(19) United States
(12) Patent Application Publication
(10) Pub. No.: US 2018/0148762 A1
(43) Pub. Date: May 31, 2018

(54) GENETIC TESTING FOR PREDICTING RESISTANCE OF SHIGELLA SPECIES AGAINST ANTIMICROBIAL AGENTS

(71) Applicant: SIEMENS HEALTHCARE GMBH, Erlangen (DE)

(72) Inventors: Andreas Keller, Puttlingen (DE); Susanne Schmolke, Erlangen (DE); Cord Friedrich Stahler, Hirschberg an der Bergstrasse (DE); Christina Backes, Saarbrucken (DE)

(21) Appl. No.: 15/578,333

(22) PCT Filed: Jun. 1, 2016
(86) PCT No.: PCT/EP2016/062379

§ 371 Date: Nov. 30, 2017

(30) Foreign Application Priority Data
Jun. 2, 2015 (EP) PCT/EP2015/062202

(51) Int. Cl. C12Q 1/18; C12Q 1/689; A61P 31/04; A61K 31/43

(52) U.S. Cl. CPC C12Q 1/18; A61K 31/43; A61P 31/04; C12Q 1/689

(57) ABSTRACT

The invention relates to a method of determining an infection of a patient with Shigella species potentially resistant to antimicrobial drug treatment, a method of selecting a treatment of a patient suffering from an antibiotic resistant Shigella infection, and a method of determining an antibiotic resistance profile for bacterial microorganisms of Shigella species, as well as computer program products used in these methods. In an exemplary method, a sample 1, is used for molecular testing 2, and then a molecular fingerprint 3 is taken. The result is then compared to a reference library 4, and the result 5 is reported.

[0001] The present invention relates to a method of determining an infection of a patient with Shigella species potentially resistant to antimicrobial drug treatment, a method of selecting a treatment of a patient suffering from an infection with a potentially resistant Shigella strain, and a method of determining an antimicrobial drug, e.g. antibiotic, resistance profile for bacterial microorganisms of Shigella species, as well as computer program products used in these methods.

[0002] Antibiotic resistance is a form of drug resistance whereby a sub-population of a microorganism, e.g. a strain of a bacterial species, can survive and multiply despite exposure to an antibiotic drug. It is a serious and health concern for the individual patient as well as a major public health issue. Timely treatment of a bacterial infection requires the analysis of clinical isolates obtained from patients with regard to antibiotic resistance, in order to select an efficacious therapy. Generally, for this purpose an association of the identified resistance with a certain microorganism (i.e. ID) is necessary.

[0003] Antibacterial drug resistance (ADR) represents a major health burden. According to the World Health Organization's antimicrobial resistance global report on surveillance, ADR leads to 25,000 deaths per year in Europe and 23,000 deaths per year in the US. In Europe, 2.5 million extra hospital days lead to societal cost of 1.5 billion euro. In the US, the direct cost of 2 million illnesses leads to 20 billion dollar direct cost. The overall cost is estimated to be substantially higher, reducing the gross domestic product (GDP) by up to 1.6%.

[0004] Shigella species are Gram-negative, facultative anaerobic rods belonging to the family of Enterobacteriaceae. The genus is divided into four serogroups with multiple serotypes: A (S dysenteriae); B (S flexneri); C (S boydii); and D (S sonnei). Shigella species are a major cause of diarrhoea and dysentery (diarrhoea with blood and mucus in the stools) throughout the world. The susceptibility of Shigella species to various antibiotics (e.g. ampicillin, trimetropin-sulfamethoxazole) decreased significantly from the 1970-80 to the 1990-2000.

[0005] In general the mechanisms for resistance of bacteria against antimicrobial treatments rely to a very substantial part on the organism's genetics. The respective genes or molecular mechanisms are either encoded in the genome of the bacteria or on plasmids that can be interchanged between different bacteria. The most common resistance mechanisms include:
[0006] 1) Efflux pumps are high-affinity reverse transport systems located in the membrane that transports the antibiotic out of the cell, e.g. resistance to tetracycline.
[0007] 2) Specific enzymes modify the antibiotic in a way that it loses its activity. In the case of streptomycin, the antibiotic is chemically modified so that it will no longer bind to the ribosome to block protein synthesis.
[0008] 3) An enzyme is produced that degrades the antibiotic, thereby inactivating it. For example, the penicillinases are a group of beta-lactamase enzymes that cleave the beta lactam ring of the penicillin molecule.

[0009] In addition, some pathogens show natural resistance against drugs. For example, an organism can lack a transport system for an antibiotic or the target of the antibiotic molecule is not present in the organism.

[0010] Pathogens that are in principle susceptible to drugs can become resistant by modification of existing genetic material (e.g. spontaneous mutations for antibiotic resistance, happening in a frequency of one in about 100 mio bacteria in an infection) or the acquisition of new genetic material from another source. One example is horizontal gene transfer, a process where genetic material contained in small packets of DNA can be transferred between individual bacteria of the same species or even between different species. Horizontal gene transfer may happen by transduction, transformation or conjugation.

[0011] Generally, testing for susceptibility/resistance to antimicrobial agents is performed by culturing organisms in different concentration of these agents.

[0012] In brief, agar plates are inoculated with patient sample (e.g. urine, sputum, blood, stool) overnight. On the next day individual colonies are used for identification of organisms, either by culturing or using mass spectroscopy. Based on the identity of organisms new plates containing increasing concentration of drugs used for the treatment of these organisms are inoculated and grown for additional 12-24 hours. The lowest drug concentration which inhibits growth (minimal inhibitory concentration—MIC) is used to determine susceptibility/resistance for tested drugs. The process takes at least 2 to 3 working days during which the patient is treated empirically. A significant reduction of time-to-result is needed especially in patients with life-threatening disease and to overcome the widespread misuse of antibiotics.

[0013] Recent developments include PCR based test kits for fast bacterial identification (e.g. Biomerieux Biofire Tests, Curetis Unyvero Tests). With these test the detection of selected resistance loci is possible for a very limited number of drugs, but no correlation to culture based AST is given. Mass spectroscopy is increasingly used for identification of pathogens in clinical samples (e.g. Bruker Biotyper), and research is ongoing to establish methods for the detection of susceptibility/resistance against antibiotics.

[0014] For some drugs such it is known that at least two targets are addressed, e.g. in case of Ciprofloxacin (drug bank ID 00537; http://www.drugbank.ca/drugs/DB00537) targets include DNA Topoisomerase IV, DNA Topoisomerase II and DNA Gyrase. It can be expected that this is also the case for other drugs although the respective secondary targets have not been identified yet. In case of a common regulation, both relevant genetic sites would naturally show a co-correlation or redundancy.

[0015] It is known that drug resistance can be associated with genetic polymorphisms. This holds for viruses, where resistance testing is established clinical practice (e.g. HIV genotyping). More recently, it has been shown that resistance has also genetic causes in bacteria and even higher organisms, such as humans where tumors resistance against certain cytostatic agents can be linked to genomic mutations.

[0016] Wozniak et al. (BMC Genomics 2012, 13(Suppl 7):S23) disclose genetic determinants of drug resistance in Staphylococcus aureus based on genotype and phenotype data. Stoesser et al. disclose prediction of antimicrobial susceptibilities for Escherichia coli and Klebsiella pneumoniae isolates using whole genomic sequence data (J Antimicrob Chemother 2013; 68: 2234-2244).

[0017] Chewapreecha et al (Chewapreecha et al (2014) Comprehensive Identification of single nucleotid polymorphisms associated with beta-lactam resistance within pneumococcal mosaic genes. PLoS Genet 10(8): e1004547) used a comparable approach to identify mutations in gram-positive Streptococcus Pneumonia.

[0018] The fast and accurate detection of infections with Shigella species and the prediction of response to anti-microbial therapy represent a high unmet clinical need.

[0019] This need is addressed by the present invention.

### SUMMARY OF THE INVENTION

[0020] The present inventors addressed this need by carrying out whole genome sequencing of a large cohort of Shigella clinical isolates and comparing the genetic mutation profile to classical culture based antimicrobial susceptibility testing with the goal to develop a test which can be used to detect bacterial susceptibility/resistance against antimicrobial drugs using molecular testing.

[0021] The inventors performed extensive studies on the genome of bacteria of Shigella species either susceptible or resistant to antimicrobial, e.g. antibiotic, drugs. Based on this information, it is now possible to provide a detailed analysis on the resistance pattern of Shigella strains based on individual genes or mutations on a nucleotide level. This analysis involves the identification of a resistance against individual antimicrobial, e.g. antibiotic, drugs as well as clusters of them. This allows not only for the determination of a resistance to a single antimicrobial, e.g. antibiotic, drug, but also to groups of antimicrobial drugs, e.g. antibiotics such as lactam or quinolone antibiotics, or even to all relevant antibiotic drugs.

[0022] Therefore, the present invention will considerably facilitate the selection of an appropriate antimicrobial, e.g. antibiotic, drug for the treatment of a Shigella infection in a patient and thus will largely improve the quality of diagnosis and treatment.

[0023] According to a first aspect, the present invention discloses a diagnostic method of determining an infection of a patient with Shigella species potentially resistant to antimicrobial drug treatment, which can be also described as a method of determining an antimicrobial drug, e.g. antibiotic, resistant Shigella infection of a patient, comprising the steps of:

[0024] a) obtaining or providing a sample containing or suspected of containing at least one Shigella species from the patient;

[0025] b) determining the presence of at least one mutation in at least two genes from the group of genes listed in Table 1 or Table 2 below, wherein the presence of said at least two mutations is indicative of an infection with an antimicrobial drug resistant, e.g. antibiotic resistant, Shigella strain in said patient.

[0026] An infection of a patient with Shigella species potentially resistant to antimicrobial drug treatment herein means an infection of a patient with Shigella species wherein it is unclear if the Shigella species is susceptible to treatment with a specific antimicrobial drug or if it is resistant to the antimicrobial drug.

[0027] In step b) above, as well as corresponding steps, at least one mutation in at least two genes is determined, so that in total at least two mutations are determined, wherein the two mutations are in different genes.

TABLE 1
List of genes

| | | | | |
|---|---|---|---|---|
| SSON53_12105 | SSON53_12455 | SSON53_12070 | SSON53_12475 | metH |
| SSON53_00425 | SSON53_23830 | SSON53_13575 | flgE | SSON53_12500 |
| SSON53_06660 | SSON53_24790 | SSON53_16770 | SSON53_24480 | SSON53_08770 |
| SSON53_04795 | SSON53_07430 | SSON53_14085 | SSON53_07440 | SSON53_08950 |
| SSON53_25555 | SSON53_09145 | SSON53_25565 | SSON53_24780 | SSON53_04400 |
| SSON53_15280 | rimO | SSON53_04930 | SSON53_23390 | rhaB |
| SSON53_17960 | thiH | SSON53_03725 | SSON53_09500 | SSON53_25405 |
| SSON53_13530 | astD | SSON53_07945 | SSON53_10080 | SSON53_10655 |
| SSON53_13400 | SSON53_13555 | SSON53_14945 | SSON53_15285 | fucI |
| SSON53_02755 | SSON53_06415 | SSON53_04615 | SSON53_17330 | pdxA |

TABLE 2
List of genes

| | | | | |
|---|---|---|---|---|
| SSON53_12105 | SSON53_12455 | SSON53_12475 | metH | SSON53_00425 |
| SSON53_23830 | SSON53_13575 | flgE | SSON53_12500 | SSON53_24790 |
| SSON53_16770 | SSON53_08770 | SSON53_04795 | SSON53_07430 | SSON53_14085 |
| SSON53_07440 | SSON53_08950 | SSON53_25555 | SSON53_09145 | SSON53_25565 |
| SSON53_24780 | SSON53_04400 | SSON53_15280 | SSON53_04930 | SSON53_23390 |
| rhaB | SSON53_17960 | thiH | SSON53_03725 | SSON53_09500 |
| SSON53_25405 | SSON53_13530 | astD | SSON53_07945 | SSON53_10080 |
| SSON53_10655 | SSON53_13400 | SSON53_13555 | SSON53_14945 | SSON53_15285 |
| fucI | SSON53_02755 | SSON53_06415 | SSON53_04615 | SSON53_17330 |
| pdxA | SSON53_04690 | SSON53_04945 | SSON53_06005 | SSON53_06085 |

[0028] According to a second aspect, the present invention relates to a method of selecting a treatment of a patient suffering from an infection with a potentially resistant Shigella stain, e.g. from an antimicrobial drug, e.g. antibiotic, resistant Shigella infection, comprising the steps of:

[0029] a) obtaining or providing a sample containing or suspected of containing at least one Shigella species from the patient;

[0030] b) determining the presence of at least one mutation in at least two genes from the group of genes listed in Table 1 or Table 2 above, wherein the presence of said at least two mutations is indicative of a resistance to one or more antimicrobial, e.g. antibiotic, drugs;

[0031] c) identifying said at least one or more antimicrobial, e.g. antibiotic, drugs; and

[0032] d) selecting one or more antimicrobial, e.g. antibiotic, drugs different from the ones identified in step c) and being suitable for the treatment of a Shigella infection.

[0033] A third aspect of the present invention relates to a method of determining an antimicrobial drug, e.g. antibiotic, resistance profile for bacterial microorganisms of Shigella species, comprising:

[0034] obtaining or providing a first data set of gene sequences of a plurality of clinical isolates of Shigella species;

[0035] providing a second data set of antimicrobial drug, e.g. antibiotic, resistance of the plurality of clinical isolates of Shigella species;

[0036] aligning the gene sequences of the first data set to at least one, preferably one, reference genome of Shigella, and/or assembling the gene sequence of the first data set, at least in part;

[0037] analyzing the gene sequences of the first data set for genetic variants to obtain a third data set of genetic variants;

[0038] correlating the third data set with the second data set and statistically analyzing the correlation; and

[0039] determining the genetic sites in the genome of Shigella associated with antimicrobial drug, e.g. antibiotic, resistance.

[0040] In addition, the present invention relates in a fourth aspect to a method of determining an antimicrobial drug, e.g. antibiotic, resistance profile for a bacterial microorganism belonging to the species Shigella comprising the steps of

[0041] a) obtaining or providing a sample containing or suspected of containing the bacterial microorganism;

[0042] b) determining the presence of a mutation in at least one gene of the bacterial microorganism as determined by the method according to the third aspect of the present invention;

[0043] wherein the presence of a mutation is indicative of a resistance to an antimicrobial, e.g. antibiotic, drug.

[0044] Furthermore, the present invention discloses in a fifth aspect a diagnostic method of determining an infection of a patient with Shigella species potentially resistant to antimicrobial drug treatment, which can, like in the first aspect, also be described as method of determining an antimicrobial drug, e.g. antibiotic, resistant Shigella infection of a patient, comprising the steps of:

[0045] a) obtaining or providing a sample containing or suspected of containing a bacterial microorganism belonging to the species Shigella from the patient;

[0046] b) determining the presence of at least one mutation in at least one gene of the bacterial microorganism belonging to the species Shigella as determined by the method according to the third aspect of the present invention, wherein the presence of said at least one mutation is indicative of an antimicrobial drug, e.g. antibiotic, resistant Shigella infection in said patient.

[0047] Also disclosed is in a sixth aspect a method of selecting a treatment of a patient suffering from an infection with a potentially resistant Shigella strain, e.g. from an antimicrobial drug, e.g. antibiotic, resistant Shigella infection, comprising the steps of:

[0048] a) obtaining or providing a sample containing or suspected of containing a bacterial microorganism belonging to the species Shigella from the patient;

[0049] b) determining the presence of at least one mutation in at least one gene of the bacterial microorganism belonging to the species Shigella as determined by the method according to the third aspect of the present invention, wherein the presence of said at least one mutation is indicative of a resistance to one or more antimicrobial, e.g. antibiotic, drugs;

[0050] c) identifying said at least one or more antimicrobial, e.g. antibiotic, drugs; and

[0051] d) selecting one or more antimicrobial, e.g. antibiotic, drugs different from the ones identified in step c) and being suitable for the treatment of a Shigella infection.

[0052] A seventh aspect of the present invention relates to a method of acquiring, respectively determining, an antimicrobial drug, e.g. antibiotic, resistance profile for a bacterial microorganisms of Shigella species, comprising:

[0053] obtaining or providing a first data set of gene sequences of a clinical isolate of Shigella species;

[0054] providing a second data set of antimicrobial drug, e.g. antibiotic, resistance of a plurality of clinical isolates of Shigella species;

[0055] aligning the gene sequences of the first data set to at least one, preferably one, reference genome of Shigella, and/or assembling the gene sequence of the first data set, at least in part;

[0056] analyzing the gene sequences of the first data set for genetic variants to obtain a third data set of genetic variants of the first data set;

[0057] correlating the third data set with the second data set and statistically analyzing the correlation; and

[0058] determining the genetic sites in the genome of Shigella of the first data set associated with antimicrobial drug, e.g. antibiotic, resistance.

[0059] According to an eighth aspect, the present invention discloses a computer program product comprising executable instructions which, when executed, perform a method according to the third, fourth, fifth, sixth or seventh aspect of the present invention.

[0060] Further aspects and embodiments of the invention are disclosed in the dependent claims and can be taken from the following description, FIGURES and examples, without being limited thereto.

### FIGURES

[0061] The enclosed drawings should illustrate embodiments of the present invention and convey a further understanding thereof. In connection with the description they serve as explanation of concepts and principles of the invention. Other embodiments and many of the stated advantages can be derived in relation to the drawings. The elements of the drawings are not necessarily to scale towards each other. Identical, functionally equivalent and acting equal features and components are denoted in the FIGURES of the drawings with the same reference numbers, unless noted otherwise.

[0062] FIG. 1 shows schematically a read-out concept for a diagnostic test according to a method of the present invention.

### DETAILED DESCRIPTION OF THE PRESENT INVENTION

### Definitions

[0063] Unless defined otherwise, technical and scientific terms used herein have the same meaning as commonly understood by one of ordinary skill in the art to which this invention belongs.

[0064] An “antimicrobial drug” in the present invention refers to a group of drugs that includes antibiotics, antifungals, antiprotozoals, and antivirals. According to certain embodiments, the antimicrobial drug is an antibiotic.

[0065] The term “nucleic acid molecule” refers to a polynucleotide molecule having a defined sequence. It comprises DNA molecules, RNA molecules, nucleotide analog molecules and combinations and derivatives thereof, such as DNA molecules or RNA molecules with incorporated nucleotide analogs or cDNA.

[0066] The term “nucleic acid sequence information” relates to information which can be derived from the sequence of a nucleic acid molecule, such as the sequence itself or a variation in the sequence as compared to a reference sequence.

[0067] The term “mutation” relates to a variation in the sequence as compared to a reference sequence. Such a reference sequence can be a sequence determined in a predominant wild type organism or a reference organism, e.g. a defined and known bacterial strain or substrain. A mutation is for example a deletion of one or multiple nucleotides, an insertion of one or multiple nucleotides, or substitution of one or multiple nucleotides, duplication of one or a sequence of multiple nucleotides, translocation of one or a sequence of multiple nucleotides, and, in particular, a single nucleotide polymorphism (SNP).

[0068] In the context of the present invention a “sample” is a sample which comprises at least one nucleic acid molecule from a bacterial microorganism. Examples for samples are: cells, tissue, body fluids, biopsy specimens, blood, urine, saliva, sputum, plasma, serum, cell culture supernatant, swab sample and others. According to certain embodiments, the sample is a patient sample (clinical isolate).

[0069] New and highly efficient methods of sequencing nucleic acids referred to as next generation sequencing have opened the possibility of large scale genomic analysis. The term “next generation sequencing” or “high throughput sequencing” refers to high-throughput sequencing technologies that parallelize the sequencing process, producing thousands or millions of sequences at once. Examples include Massively Parallel Signature Sequencing (MPSS), Polony sequencing, 454 pyrosequencing, Illumina (Solexa) sequencing, SOLiD sequencing, Ion semiconductor sequencing, DNA nanoball sequencing, Helioscope™ single molecule sequencing, Single Molecule SMRT™ sequencing, Single Molecule real time (RNAP) sequencing, Nanopore DNA sequencing, Sequencing By Hybridization, Amplicon Sequencing, GnuBio.

[0070] Within the present description the term “microorganism” comprises the term microbe. The type of microorganism is not particularly restricted, unless noted otherwise or obvious, and, for example, comprises bacteria, viruses, fungi, microscopic algae and protozoa, as well as combinations thereof. According to certain aspects, it refers to one or more Shigella species, particularly Shigella boydii, Shigella dysenteriae, Shigella flexneri, Shigella sonnei and/or other Shigella species.

[0071] A reference to a microorganism or microorganisms in the present description comprises a reference to one microorganism as well a plurality of microorganisms, e.g. two, three, four, five, six or more microorganisms.

[0072] A vertebrate within the present invention refers to animals having a vertebrae, which includes mammals—including humans, birds, reptiles, amphibians and fishes. The present invention thus is not only suitable for human medicine, but also for veterinary medicine.

[0073] According to certain embodiments, the patient in the present methods is a vertebrate, more preferably a mammal and most preferred a human patient.

[0074] Before the invention is described in exemplary detail, it is to be understood that this invention is not limited to the particular component parts of the process steps of the methods described herein as such methods may vary. It is also to be understood that the terminology used herein is for purposes of describing particular embodiments only, and is not intended to be limiting. It must be noted that, as used in the specification and the appended claims, the singular forms “a,” “an” and “the” include singular and/or plural referents unless the context clearly dictates otherwise. For example, the term “a” as used herein can be understood as one single entity or in the meaning of “one or more” entities. It is also to be understood that plural forms include singular and/or plural referents unless the context clearly dictates otherwise. It is moreover to be understood that, in case parameter ranges are given which are delimited by numeric values, the ranges are deemed to include these limitation values.

[0075] Regarding the dosage of the antimicrobial, e.g. antibiotic, drugs, it is referred to the established principles of pharmacology in human and veterinary medicine. For example, Forth, Henschler, Rummel “Allgemeine und spezielle Pharmakologie und Toxikologie”, 9th edition, 2005, pp. 781-919, might be used as a guideline. Regarding the formulation of a ready-to-use medicament, reference is made to “Remington, The Science and Practice of Pharmacy”, 22^{nd} edition, 2013, pp. 777-1070.

[0076] Assembling of a gene sequence can be carried out by any known method and is not particularly limited.

[0077] According to certain embodiments, mutations that were found using alignments can also be compared or matched with alignment-free methods, e.g. for detecting single base exchanges, for example based on contigs that were found by assemblies. For example, reads obtained from sequencing can be assembled to contigs and the contigs can be compared to each other.

[0078] According to a first aspect, the present invention relates to a diagnostic method of determining an infection of a patient with Shigella species potentially resistant to antimicrobial drug treatment, which can also be described as method of determining an antimicrobial drug, e.g. antibiotic, resistant Shigella infection of a patient, comprising the steps of:

[0079] a) obtaining or providing a sample containing or suspected of containing at least one Shigella species from the patient;

[0080] b) determining the presence of at least one mutation in at least two genes from the group of genes consisting of SSON53_12105, SSON53_12455, SSON53_12070, SSON53_12475, metH, SSON53_00425, SSON53_23830, SSON53_13575, flgE, SSON53_12500, SSON53_06660, SSON53_24790, SSON53_16770, SSON53_24480, SSON53_08770, SSON53_04795, SSON53_07430, SSON53_14085, SSON53_07440, SSON53_08950, SSON53_25555, SSON53_09145, SSON53_25565, SSON53_24780, SSON53_04400, SSON53_15280, rimO, SSON53_04930, SSON53_23390, rhaB, SSON53_17960, thiH, SSON53_03725, SSON53_09500, SSON53_25405, SSON53_13530, astD, SSON53_07945, SSON53_10080, SSON53_10655, SSON53_13400, SSON53_13555, SSON53_14945, SSON53_15285, fucI, SSON53_02755, SSON53_06415, SSON53_04615, SSON53_17330, and pdxA, or from the group of genes consisting of SSON53_12105, SSON53_12455, SSON53_12475, metH, SSON53_00425, SSON53_23830, SSON53_13575, flgE, SSON53_12500, SSON53_24790, SSON53_16770, SSON53_08770, SSON53_04795, SSON53_07430, SSON53_14085, SSON53_07440, SSON53_08950, SSON53_25555, SSON53_09145, SSON53_25565, SSON53_24780, SSON53_04400, SSON53_15280, SSON53_04930, SSON53_23390, rhaB, SSON53_17960, thiH, SSON53_03725, SSON53_09500, SSON53_25405, SSON53_13530, astD, SSON53_07945, SSON53_10080, SSON53_10655, SSON53_13400, SSON53_13555, SSON53_14945, SSON53_15285, fucI, SSON53_02755, SSON53_06415, SSON53_04615, SSON53_17330, pdxA, SSON53_04690, SSON53_04945, SSON53_06005, and SSON53_06085, wherein the presence of said at least two mutations is indicative of an infection with an antimicrobial, e.g. antibiotic, resistant Shigella strain in said patient.

[0081] In this method, as well as the other methods of the invention, the sample can be provided or obtained in any way, preferably non-invasive, and can be e.g. provided as an in vitro sample or prepared as in vitro sample.

[0082] According to certain aspects, mutations in at least two, three, four, five, six, seven, eight, nine or ten genes are determined in any of the methods of the present invention, e.g. in at least two genes or in at least three genes. Instead of testing only single genes or mutants, a combination of several variant positions can improve the prediction accuracy and further reduce false positive findings that are influenced by other factors. Therefore, it is in particular preferred to determine the presence of a mutation in 2, 3, 4, 5, 6, 7, 8 or 9 (or more) genes selected from Table 1 or 2.

[0083] For the above genes, i.e. the genes also denoted in Tables 1 and 2, the highest probability of a resistance to at least one antimicrobial drug, e.g. antibiotic, could be observed, with p-values smaller than 10⁻³⁰, particularly smaller than 10⁻⁴⁰, indicating the high significance of the values (n=470; α=0.05). Details regarding Tables 1 and 2 can be taken from Tables 3 and 4 (4a, 4b, 4c) disclosed in the Examples. Having at least two genes with mutations determined, a high probability of an antimicrobial drug, e.g. antibiotic, resistance could be determined. The genes in Table 1 thereby represent the 50 best genes for which a mutation was observed in the genomes of Shigella species, whereas the genes in Table 2 represent the 50 best genes for which a cross-correlation could be observed for the antimicrobial drug, e.g. antibiotic, susceptibility testing for Shigella species as described below.

[0084] According to certain embodiments, the obtaining or providing a sample containing or suspected of containing at least one Shigella species from the patient in this method—as well as the other methods of the invention—can comprise the following:

[0085] A sample of a vertebrate, e.g. a human, e.g. is provided or obtained and nucleic acid sequences, e.g. DNA or RNA sequences, are recorded by a known method for recording nucleic acid, which is not particularly limited. For example, nucleic acid can be recorded by a sequencing method, wherein any sequencing method is appropriate, particularly sequencing methods wherein a multitude of sample components, as e.g. in a blood sample, can be analyzed for nucleic acids and/or nucleic acid fragments and/or parts thereof contained therein in a short period of time, including the nucleic acids and/or nucleic acid fragments and/or parts thereof of at least one microorganism of interest, particularly of at least one Shigella species. For example, sequencing can be carried out using polymerase chain reaction (PCR), particularly multiplex PCR, or high throughput sequencing or next generation sequencing, preferably using high-throughput sequencing. For sequencing, preferably an in vitro sample is used.

[0086] The data obtained by the sequencing can be in any format, and can then be used to identify the nucleic acids, and thus genes, of the microorganism, e.g. of Shigella species, to be identified, by known methods, e.g. fingerprinting methods, comparing genomes and/or aligning to at least one, or more, genomes of one or more species of the microorganism of interest, i.e. a reference genome, etc., forming a third data set of aligned genes for a Shigella species—discarding additional data from other sources, e.g. the vertebrate. Reference genomes are not particularly limited and can be taken from several databases. Depending on the microorganism, different reference genomes or more than one reference genomes can be used for aligning. Using the reference genome—as well as also the data from the genomes of the other species, e.g. Shigella species—mutations in the genes for each species and for the whole multitude of samples of different species, e.g. Shigella species, can be obtained.

[0087] For example, it is useful in genome-wide association studies to reference the points of interest, e.g. mutations, to one constant reference for enhanced standardization. In case of the human with a high consistency of the genome and 99% identical sequences among individuals this is easy and represents the standard, as corresponding reference genomes are available in databases. In case of organisms that trigger infectious diseases (e.g. bacteria and viruses) this is much more difficult, though. One possibility is to fall back on a virtual pan genome which contains all sequences of a certain genus. A further possibility is the analysis of all available references, which is much more complex. Therein all n references from a database (e.g. RefSeq) are extracted and compared with the newly sequenced bacterial genomes k. After this, matrices (% of mapped reads, % of covered genome) are applied to estimate which reference is best suited to all new bacteria. However, n×k complete alignments are carried out. Having a big number of references, though, stable results can be obtained, as is the case for Shigella.

[0088] According to certain embodiments, the genomes of Shigella species are referenced to one reference genome. However, it is not excluded that for other microorganisms more than one reference genome is used. In the present methods, the reference genome of Shigella is NC 016822 as annotated at the NCBI according to certain embodiments.

[0089] The reference sequence was obtained from Shigella strain NC_016822 (http://www.genome.jp/dbget-bin/www_bget?refseq+NC_016822), and can be found as SEQ ID NO 1 in the sequence listing.

[0090] LOCUS NC_016822 4988504 bp DNA circular CON 7 Feb. 2015

[0091] DEFINITION Shigella sonnei 53G main chromosome, complete genome.

[0092] ACCESSION NC_016822

[0093] VERSION NC_016822.1 GI:377520096

[0094] DBLINK BioProject: PRJNA224116
[0095] Assembly: GCF 000283715.1

[0096] KEYWORDS RefSeq; complete genome; complete replicon.

[0097] SOURCE Shigella sonnei 53G
[0098] ORGANISM Shigella sonnei 53G
   [0099] Bacteria; Proteobacteria; Gammaproteobacteria; Enterobacteriales;
   [0100] Enterobacteriaceae; Shigella.

[0101] REFERENCE 1
[0102] AUTHORS Thomson, N. R.
[0103] TITLE The genome of Shigella sonnei strain 53G
[0104] JOURNAL Unpublished

[0105] REFERENCE 2 (bases 1 to 4988504)
[0106] AUTHORS Aslett, M. A.
[0107] TITLE Direct Submission
[0108] JOURNAL Submitted (30 Nov. 2011) Aslett M. A., Wellcome Trust Sanger

[0109] Institute, Pathogen Sequencing Unit, Wellcome Trust Genome Campus,

[0110] Hinxton, Cambridge, Cambridgeshire CB10 1SA, UNITED KINGDOM

[0111] Alternatively or in addition, the gene sequence of the first data set can be assembled, at least in part, with known methods, e.g. by de-novo assembly or mapping assembly. The sequence assembly is not particularly limited, and any known genome assembler can be used, e.g. based on Sanger, 454, Solexa, Illumina, SOLid technologies, etc., as well as hybrids/mixtures thereof.

[0112] According to certain embodiments, the data of nucleic acids of different origin than the microorganism of interest, e.g. Shigella species, can be removed after the nucleic acids of interest are identified, e.g. by filtering the data out. Such data can e.g. include nucleic acids of the patient, e.g. the vertebrate, e.g. human, and/or other microorganisms, etc. This can be done by e.g. computational subtraction, as developed by Meyerson et al. 2002. For this, also aligning to the genome of the vertebrate, etc., is possible. For aligning, several alignment-tools are available. This way the original data amount from the sample can be drastically reduced.

[0113] Also after such removal of “excess” data, fingerprinting and/or aligning, and/or assembly, etc. can be carried out, as described above, forming a third data set of aligned and/or assembled genes for a Shigella species.

[0114] Using these techniques, genes with mutations of the microorganism of interest, e.g. Shigella species, can be obtained for various species.

[0115] When testing these same species for antimicrobial drug, e.g. antibiotic, susceptibility of a number of antimicrobial drugs, e.g. antibiotics, e.g. using standard culturing methods on dishes with antimicrobial drug, e.g. antibiotic, intake, as e.g. described below, the results of these antimicrobial drug, e.g. antibiotic, susceptibility tests can then be cross-referenced/correlated with the mutations in the genome of the respective microorganism, e.g. Shigella. Using several, e.g. 50 or more than 50, 100 or more than 100, 200 or more than 200, 300 or more than 300, 400 or more than 400, or 450 or more than 450 different species of a microorganism, e.g. different Shigella species, statistical analysis can be carried out on the obtained cross-referenced data between mutations and antimicrobial drug, e.g. antibiotic, susceptibility for these number of species, using known methods.

[0116] Regarding culturing methods, samples can be e.g. cultured overnight. On the next day individual colonies can be used for identification of organisms, either by culturing or using mass spectroscopy. Based on the identity of organisms new plates containing increasing concentration of antibiotics used for the treatment of these organisms are inoculated and grown for additional 12-24 hours. The lowest drug concentration which inhibits growth (minimal inhibitory concentration—MIC) can be used to determine susceptibility/resistance for tested antibiotics.

[0117] Correlation of the nucleic acid/gene mutations with antimicrobial drug, e.g. antibiotic, resistance can be carried out in a usual way and is not particularly limited. For example, resistances can be correlated to certain genes or certain mutations, e.g. SNPs, in genes. After correlation, statistical analysis can be carried out.

[0118] In addition, statistical analysis of the correlation of the gene mutations with antimicrobial drug, e.g. antibiotic, resistance is not particularly limited and can be carried out, depending on e.g. the amount of data, in different ways, for example using analysis of variance (ANOVA) or Student's t-test, for example with a sample size n of 50 or more, 100 or more, 200 or more, 300 or more, 400 or more or 450 or more, and a level of significance (α-error-level) of e.g. 0.05 or smaller, e.g. 0.05, preferably 0.01 or smaller. A statistical value can be obtained for each gene and/or each position in the genome as well as for all antibiotics tested, a group of antibiotics or a single antibiotic. The obtained p-values can also be adapted for statistical errors, if needed.

[0119] For statistically sound results a multitude of individuals should be sampled, with n=50 or more, 100 or more, 200 or more, 300 or more, 400 or more or 450 or more, and a level of significance (α-error-level) of e.g. 0.05 or smaller, e.g. 0.05, preferably 0.01 or smaller. According to certain embodiments, particularly significant results can be obtained for n=200 or more, 300 or more, 400 or more or 450 or more.

[0120] For statistically sound results a multitude of individuals should be sampled, with n=50, 100, 200, 300, 400 or 450, and a level of significance (α-error-level) of e.g. 0.05 or smaller, e.g. 0.05, preferably 0.01 or smaller. According to certain embodiments, particularly significant results can be obtained for n=200, 300, 400 or 450. According to certain embodiments, p-values can be adjusted for multiple testing using approaches as bonferroni adjustment or by controlling the false discovery rate ((FDR)

[0121] After the above procedure has been carried out for more than 450, e.g. 470, individual species of Shigella, the data disclosed in Tables 1 and 2 were obtained for the statistically best correlations between gene mutations and antimicrobial drug, e.g. antibiotic, resistances. Thus, mutations in these genes were proven as valid markers for antimicrobial drug, e.g. antibiotic, resistance.

[0122] According to a further aspect, the present invention relates in a second aspect to a method of selecting a treatment of a patient suffering from an infection with a potentially resistant Shigella stain, e.g. from an antimicrobial drug, e.g. antibiotic, resistant Shigella infection, comprising the steps of:

[0123] a) obtaining or providing a sample containing or suspected of containing at least one Shigella species from the patient;

[0124] b) determining the presence of at least one mutation in at least two genes from the group of genes consisting of SSON53_12105, SSON53_12455, SSON53_12070, SSON53_12475, metH, SSON53_00425, SSON53_23830, SSON53_13575, flgE, SSON53_12500, SSON53_06660, SSON53_24790, SSON53_16770, SSON53_24480, SSON53_08770, SSON53_04795, SSON53_07430, SSON53_14085, SSON53_07440, SSON53_08950, SSON53_25555, SSON53_09145, SSON53_25565, SSON53_24780, SSON53_04400, SSON53_15280, rimO, SSON53_04930, SSON53_23390, rhaB, SSON53_17960, thiH, SSON53_03725, SSON53_09500, SSON53_25405, SSON53_13530, astD, SSON53_07945, SSON53_10080, SSON53_10655, SSON53_13400, SSON53_13555, SSON53_14945, SSON53_15285, fucI, SSON53_02755, SSON53_06415, SSON53_04615, SSON53_17330, and pdxA, or from the group of genes consisting of SSON53_12105, SSON53_12455, SSON53_12475, metH, SSON53_00425, SSON53_23830, SSON53_13575, flgE, SSON53_12500, SSON53_24790, SSON53_16770, SSON53_08770, SSON53_04795, SSON53_07430, SSON53_14085, SSON53_07440, SSON53_08950, SSON53_25555, SSON53_09145, SSON53_25565, SSON53_24780, SSON53_04400, SSON53_15280, SSON53_04930, SSON53_23390, rhaB, SSON53_17960, thiH, SSON53_03725, SSON53_09500, SSON53_25405, SSON53_13530, astD, SSON53_07945, SSON53_10080, SSON53_10655, SSON53_13400, SSON53_13555, SSON53_14945, SSON53_15285, fucI, SSON53_02755, SSON53_06415, SSON53_04615, SSON53_17330, pdxA, SSON53_04690, SSON53_04945, SSON53_06005, and SSON53_06085, wherein the presence of said at least two mutations is indicative of a resistance to one or more antimicrobial, e.g. antibiotic, drugs;

[0125] c) identifying said at least one or more antimicrobial, e.g. antibiotic, drugs; and

[0126] d) selecting one or more antimicrobial, e.g. antibiotic, drugs different from the ones identified in step c) and being suitable for the treatment of a Shigella infection.

[0127] In this method, the steps a) of obtaining or providing a sample and b) of determining the presence of at least one mutation are as in the method of the first aspect.

[0128] The identification of the at least one or more antimicrobial, e.g. antibiotic, drug in step c) is then based on the results obtained in step b) and corresponds to the antimicrobial, e.g. antibiotic, drug(s) that correlate(s) with the mutations. Once these antimicrobial drugs, e.g. antibiotics, are ruled out, the remaining antimicrobial drugs, e.g. antibiotic drugs/antibiotics, can be selected in step d) as being suitable for treatment.

[0129] In the description, references to the first and second aspect also apply to the 19^{th}, 20^{th}, 21^{st} and 22^{nd} aspect, referring to the same genes, unless clear from the context that they don't apply.

[0130] According to certain embodiments, the antimicrobial drug, e.g. antibiotic, in the method of the first or second aspect, as well as in the other methods of the invention, is at least one selected from the group of β-lactams, β-lactam inhibitors, quinolines and derivatives thereof, aminoglycosides, polyketides, respectively tetracyclines, and folate synthesis inhibitors.

[0131] In the methods of the invention the resistance of Shigella to one or more antimicrobial, e.g. antibiotic, drugs can be determined according to certain embodiments.

[0132] Results with particular significance and low p-values can be obtained in the methods of the first and second aspect when the antimicrobial, e.g. antibiotic, drug is selected from lactam antibiotics, and particularly when the presence of a mutation in the following genes is determined: SSON53_12105, SSON53_12455, SSON53_12070, SSON53_12475, metH, SSON53_00425, SSON53_23830, SSON53_13575, flgE, SSON53_12500, SSON53_06660, SSON53_24790, SSON53_16770, SSON53_24480, SSON53_08770, SSON53_04795, SSON53_07430, SSON53_14085, SSON53_07440, SSON53_08950, SSON53_25555, SSON53_09145, SSON53_25565, SSON53_24780, SSON53_04400, SSON53_15280, rimO, SSON53_04930, SSON53_23390, rhaB, SSON53_17960, thiH, SSON53_03725, SSON53_09500, SSON53_25405, SSON53_13530, astD, SSON53_07945, SSON53_10080, SSON53_10655, SSON53_13400, SSON53_13555, SSON53_14945, SSON53_15285, fucI, SSON53_02755, SSON53_06415, SSON53_04615, SSON53_17330, and/or pdxA, or SSON53_12105, SSON53_12455, SSON53_12475, metH, SSON53_00425, SSON53_23830, SSON53_13575, flgE, SSON53_12500, SSON53_24790, SSON53_16770, SSON53_08770, SSON53_04795, SSON53_07430, SSON53_14085, SSON53_07440, SSON53_08950, SSON53_25555, SSON53_09145, SSON53_25565, SSON53_24780, SSON53_04400, SSON53_15280, SSON53_04930, SSON53_23390, rhaB, SSON53_17960, thiH, SSON53_03725, SSON53_09500, SSON53_25405, SSON53_13530, astD, SSON53_07945, SSON53_10080, SSON53_10655, SSON53_13400, SSON53_13555, SSON53_14945, SSON53_15285, fucI, SSON53_02755, SSON53_06415, SSON53_04615, SSON53_17330, pdxA, SSON53_04690, SSON53_04945, SSON53_06005, and/or SSON53_06085.

[0133] For the lactam antibiotics, the p-values are that low for these genes that a statistically significant determination of antibiotic susceptibility is possible in particular.

[0134] According to certain embodiments of the first and/or second aspect of the invention the antimicrobial, e.g. antibiotic, drug is selected from polyketide antibiotics, preferably tetracycline antibiotics, and the presence of a mutation in the following genes is determined: metH, SSON53_24790, SSON53_08770, SSON53_24780, SSON53_15280, SSON53_10655, SSON53_13555, and/or SSON53_06415, or metH, SSON53_24790, SSON53_08770, SSON53_24780, SSON53_15280, SSON53_10655, SSON53_13555, and/or SSON53_06415.

[0135] According to certain embodiments, the antimicrobial drug is an antibiotic/antibiotic drug.

[0136] According to certain embodiments of the first and/or second aspect of the invention, determining the nucleic acid sequence information or the presence of a mutation comprises determining the presence of a single nucleotide at a single position in a gene. Thus the invention comprises methods wherein the presence of a single nucleotide polymorphism or mutation at a single nucleotide position is detected.

[0137] According to certain embodiments, the antibiotic drug in the methods of the present invention is selected from the group consisting of Amoxicillin/K Clavulanate (AUG), Ampicillin (AM), Aztreonam (AZT), Cefazolin (CFZ), Cefepime (CPE), Cefotaxime (CFT), Ceftazidime (CAZ), Ceftriaxone (CAX), Cefuroxime (CRM), Cephalotin (CF), Ciprofloxacin (CP), Ertapenem (ETP), Gentamicin (GM), Imipenem (IMP), Levofloxacin (LVX), Meropenem (MER), Piperacillin/Tazobactam (P/T), Ampicillin/Sulbactam (A/S), Tetracycline (TE), Tobramycin (TO), and Trimethoprim/Sulfamethoxazole (T/S).

[0138] The inventors have surprisingly found that mutations in certain genes are indicative not only for a resistance to one single antimicrobial, e.g. antibiotic, drug, but to groups containing several drugs, sometimes even for drugs from different drug classes.

[0139] According to certain embodiments of the first and/or second aspect of the invention, the gene is from Table 1, the antibiotic drug is selected from lactam antibiotics and a mutation in at least one of the following genes is detected with regard to reference genome NC_016822: SSON53_12105, SSON53_12455, SSON53_12070, SSON53_12475, metH, SSON53_00425, SSON53_23830, SSON53_13575, flgE, SSON53_12500, SSON53_06660, SSON53_24790, SSON53_16770, SSON53_24480, SSON53_08770, SSON53_04795, SSON53_07430, SSON53_14085, SSON53_07440, SSON53_08950, SSON53_25555, SSON53_09145, SSON53_25565, SSON53_24780, SSON53_04400, SSON53_15280, rimO, SSON53_04930, SSON53_23390, rhaB, SSON53_17960, thiH, SSON53_03725, SSON53_09500, SSON53_25405, SSON53_13530, astD, SSON53_07945, SSON53_10080, SSON53_10655, SSON53_13400, SSON53_13555, SSON53_14945, SSON53_15285, fucI, SSON53_02755, SSON53_06415, SSON53_04615, SSON53_17330, pdxA.

[0140] According to certain embodiments of the first and/or second aspect of the invention, the gene is from Table 1, the antibiotic drug is selected from polyketide, preferably tetracycline antibiotics and a mutation in at least one of the following genes is detected with regard to reference genome NC_016822: metH, SSON53_24790, SSON53_08770, SSON53_24780, SSON53_15280, SSON53_10655, SSON53_13555, SSON53_06415.

[0141] According to certain embodiments of the first and/or second aspect of the invention, the gene is from Table 2, the antibiotic drug is selected from lactam antibiotics and a mutation in at least one of the following genes is detected with regard to reference genome NC_016822: SSON53_12105, SSON53_12455, SSON53_12475, metH, SSON53_00425, SSON53_23830, SSON53_13575, flgE, SSON53_12500, SSON53_24790, SSON53_16770, SSON53_08770, SSON53_04795, SSON53_07430, SSON53_14085, SSON53_07440, SSON53_08950, SSON53_25555, SSON53_09145, SSON53_25565, SSON53_24780, SSON53_04400, SSON53_15280, SSON53_04930, SSON53_23390, rhaB, SSON53_17960, thiH, SSON53_03725, SSON53_09500, SSON53_25405, SSON53_13530, astD, SSON53_07945, SSON53_10080, SSON53_10655, SSON53_13400, SSON53_13555, SSON53_14945, SSON53_15285, fucI, SSON53_02755, SSON53_06415, SSON53_04615, SSON53_17330, pdxA, SSON53_04690, SSON53_04945, SSON53_06005, SSON53_06085.

[0142] According to certain embodiments of the first and/or second aspect of the invention, the gene is from Table 2, the antibiotic drug is selected from polyketide, preferably tetracycline antibiotics and a mutation in at least one of the following genes is detected with regard to reference genome NC_016822: metH, SSON53_24790, SSON53_08770, SSON53_24780, SSON53_15280, SSON53_10655, SSON53_13555, SSON53_06415.

[0143] For specific antimicrobial drugs, e.g. antibiotics, specific positions in the above genes can be determined where a high statistical significance is observed. The inventors found that, apart from the above genes indicative of a resistance against antibiotics, also single nucleotide polymorphisms (=SNP's) may have a high significance for the presence of a resistance against defined antibiotic drugs. The analysis of these polymorphisms on a nucleotide level may further improve and accelerate the determination of a drug resistance to antimicrobial drugs, e.g. antibiotics, in Shigella.

[0144] According to certain embodiments of the first and/or second aspect of the invention, the gene is from Table 1, the antibiotic drug is selected from lactam antibiotics and a mutation in at least one of the following nucleotide positions is detected with regard to reference genome NC_016822: 2241215, 2309519, 2233949, 2314492, 4595667, 87512, 4502174, 2543074, 1159191, 2325584, 1303652, 4707429, 3134050, 4648709, 1655745, 949314, 1427818, 2636621, 1429397, 1690889, 4856482, 1723070, 4857482, 4705326, 862961, 2876708, 887353, 980321, 4429947, 4431976, 3376607, 4565385, 750613, 1781189, 4821412, 2533864, 1511130, 1513422, 1901825, 1990704, 2506615, 2539010, 2803779, 2877526, 3239464, 545532, 1257335, 906989, 3237959, 60014.

[0145] According to certain embodiments of the first and/or second aspect of the invention, the gene is from Table 1, the antibiotic drug is selected from polyketide, preferably tetracycline antibiotics and a mutation in at least one of the following nucleotide positions is detected with regard to reference genome NC_016822: 4595667, 4707429, 1655745, 4705326, 2876708, 1990704, 2539010, 1257335.

[0146] According to certain embodiments of the first and/or second aspect of the invention, the gene is from Table 2, the antibiotic drug is selected from lactam antibiotics and a mutation in at least one of the following nucleotide positions is detected with regard to reference genome NC_016822: 2241215, 2309519, 2314492, 4595667, 87512, 4502174, 2543074, 1159191, 2325584, 4707429, 3134050, 1655745, 949314, 1427818, 2636621, 1429397, 1690889, 4856482, 1723070, 4857482, 4705326, 862961, 2876708, 980321, 4429947, 4431976, 3376607, 4565385, 750613, 1781189, 4821412, 2533864, 1511130, 1513422, 1901825, 1990704, 2506615, 2539010, 2803779, 2877526, 3239464, 545532, 1257335, 906989, 3237959, 60014, 921872, 983367, 1182426, 1200860.

[0147] According to certain embodiments of the first and/or second aspect of the invention, the gene is from Table 2, the antibiotic drug is selected from polyketide, preferably tetracycline antibiotics and a mutation in at least one of the following nucleotide positions is detected with regard to reference genome NC_016822: 4595667, 4707429, 1655745, 4705326, 2876708, 1990704, 2539010, 1257335.

[0148] According to certain embodiments of the first and/or second aspect of the invention, the antibiotic drug is CF and a mutation in at least one of the following nucleotide positions is detected with regard to reference genome NC_016822: 2241215, 2309519, 2314492, 4595667, 87512, 4502174, 2543074, 1159191, 2325584, 4707429, 3134050, 1655745, 949314, 1427818, 2636621, 1429397, 1690889, 4856482, 1723070, 4857482, 4705326, 862961, 2876708, 980321, 4429947, 4431976, 3376607, 4565385, 750613, 1781189, 4821412, 2533864, 1511130, 1513422, 1901825, 1990704, 2506615, 2539010, 2803779, 2877526, 3239464, 545532, 1257335, 906989, 3237959, 60014, 921872, 983367, 1182426, 1200860.

[0149] According to certain embodiments of the first and/or second aspect of the invention, the antibiotic drug is CFZ and a mutation in at least one of the following nucleotide positions is detected with regard to reference genome NC_016822: 3134050.

[0150] According to certain embodiments of the first and/or second aspect of the invention, the antibiotic drug is A/S and a mutation in at least one of the following nucleotide positions is detected with regard to reference genome NC_016822: 2241215, 2309519, 2314492, 4595667, 87512, 4502174, 2543074, 1159191, 2325584, 4707429, 3134050, 1655745, 949314, 1427818, 2636621, 1429397, 1690889, 4856482, 1723070, 4857482, 4705326, 862961, 2876708, 980321, 4429947, 4431976, 3376607, 4565385, 750613, 1781189, 4821412, 2533864, 1511130, 1513422, 1901825, 1990704, 2506615, 2539010, 2803779, 2877526, 3239464, 545532, 1257335, 906989, 3237959, 60014, 921872, 983367, 1182426, 1200860.

[0151] According to certain embodiments of the first and/or second aspect of the invention, the antibiotic drug is CRM and a mutation in at least one of the following nucleotide positions is detected with regard to reference genome NC_016822: 2241215, 2309519, 2314492, 4595667, 87512, 4502174, 2543074, 1159191, 2325584, 4707429, 3134050, 1655745, 949314, 1427818, 2636621, 1429397, 1690889, 4856482, 1723070, 4857482, 4705326, 862961, 2876708, 980321, 4429947, 4431976, 3376607, 4565385, 750613, 1781189, 4821412, 2533864, 1511130, 1513422, 1901825, 1990704, 2506615, 2539010, 2803779, 2877526, 3239464, 545532, 1257335, 906989, 3237959, 60014, 921872, 983367, 1182426, 1200860.

[0152] According to certain embodiments of the first and/or second aspect of the invention, the antibiotic drug is P/T and a mutation in at least one of the following nucleotide positions is detected with regard to reference genome NC_016822: 2241215, 4595667, 4502174, 2543074, 1159191, 2325584, 4707429, 3134050, 1655745, 949314, 1427818, 1429397, 1690889, 4856482, 1723070, 4857482, 4705326, 862961, 2876708, 980321, 4429947, 4431976, 3376607, 4565385, 750613, 1781189, 4821412, 2533864, 1511130, 1513422, 1901825, 1990704, 2506615, 2539010, 2803779, 2877526, 3239464, 545532, 1257335, 906989, 3237959, 60014, 921872, 983367, 1182426, 1200860.

[0153] According to certain embodiments of the first and/or second aspect of the invention, the antibiotic drug is AM and a mutation in at least one of the following nucleotide positions is detected with regard to reference genome NC_016822: 2241215, 2309519, 2314492, 4595667, 87512, 4502174, 2543074, 1159191, 2325584, 4707429, 3134050, 1655745, 949314, 1427818, 2636621, 1429397, 1690889, 4856482, 1723070, 4857482, 4705326, 862961, 2876708, 980321, 4429947, 4431976, 3376607, 4565385, 750613, 1781189, 4821412, 2533864, 1511130, 1513422, 1901825, 1990704, 2506615, 2539010, 2803779, 2877526, 3239464, 545532, 1257335, 906989, 3237959, 60014, 921872, 983367, 1182426, 1200860.

[0154] According to certain embodiments of the first and/or second aspect of the invention, the antibiotic drug is AUG and a mutation in at least one of the following nucleotide positions is detected with regard to reference genome NC_016822: 2309519, 2314492, 4595667, 87512, 1159191, 2325584, 4707429, 3134050, 1427818, 2636621, 1429397, 2877526, 1200860.

[0155] According to certain embodiments of the first and/or second aspect of the invention, the antibiotic drug is TE and a mutation in at least one of the following nucleotide positions is detected with regard to reference genome NC_016822: 4595667, 4707429, 1655745, 4705326, 2876708, 1990704, 2539010, 1257335.

[0156] According to certain embodiments of the first and/or second aspect of the invention, the resistance of a bacterial microorganism belonging to the species Shigella against 1, 2, 3, 4, 5, 6, 7, 8, 9, 10, 11, 12, 13, 14, 15 or 16, 17, 18, 19, 20 or 21 antibiotic drugs is determined.

[0157] According to certain embodiments of the first and/or second aspect of the invention, a detected mutation is a mutation leading to an altered amino acid sequence in a polypeptide derived from a respective gene in which the detected mutation is located. According to this aspect, the detected mutation thus leads to a truncated version of the polypeptide (wherein a new stop codon is created by the mutation) or a mutated version of the polypeptide having an amino acid exchange at the respective position.

[0158] According to certain embodiments of the first and/or second aspect of the invention, determining the nucleic acid sequence information or the presence of a mutation comprises determining a partial sequence or an entire sequence of the at least two genes.

[0159] According to certain embodiments of the first and/or second aspect of the invention, determining the nucleic acid sequence information or the presence of a mutation comprises determining a partial or entire sequence of the genome of the Shigella species, wherein said partial or entire sequence of the genome comprises at least a partial sequence of said at least two genes.

[0160] According to certain embodiments of the first and/or second aspect of the invention, determining the nucleic acid sequence information or the presence of a mutation comprises using a next generation sequencing or high throughput sequencing method. According to preferred embodiments of the first and/or second aspect of the invention, a partial or entire genome sequence of the bacterial organism of Shigella species is determined by using a next generation sequencing or high throughput sequencing method.

[0161] In a further, third aspect, the present invention relates to a method of determining an antimicrobial drug, e.g. antibiotic, resistance profile for bacterial microorganisms of Shigella species, comprising:

[0162] obtaining or providing a first data set of gene sequences of a plurality of clinical isolates of Shigella species;

[0163] providing a second data set of antimicrobial drug, e.g. antibiotic, resistance of the plurality of clinical isolates of Shigella species;

[0164] aligning the gene sequences of the first data set to at least one, preferably one, reference genome of Shigella, and/or assembling the gene sequence of the first data set, at least in part;

[0165] analyzing the gene sequences of the first data set for genetic variants to obtain a third data set of genetic variants;

[0166] correlating the third data set with the second data set and statistically analyzing the correlation; and

[0167] determining the genetic sites in the genome of Shigella associated with antimicrobial drug, e.g. antibiotic, resistance.

[0168] The different steps can be carried out as described with regard to the method of the first aspect of the present invention.

[0169] When referring to the second data set, wherein the second data set e.g. comprises, respectively is, a set of antimicrobial drug, e.g. antibiotic, resistances of a plurality of clinical isolates, this can, within the scope of the invention, also refer to a self-learning data base that, whenever a new sample is analyzed, can take this sample into the second data set and thus expand its data base. The second data set thus does not have to be static and can be expanded, either by external input or by incorporating new data due to self-learning. This is, however, not restricted to the third aspect of the invention, but applies to other aspects of the invention that refer to a second data set, which does not necessarily have to refer to antimicrobial drug resistance. The same applies, where applicable, to the first data set, e.g. in the third aspect.

[0170] According to certain embodiments, statistical analysis in the present methods is carried out using Fisher's test with p<10⁻⁶, preferably p<10⁻⁹, particularly p<10⁻¹⁰.

[0171] The method of the third aspect of the present invention, as well as related methods, e.g. according to the 7^{th}, 10^{th}, 11^{th}, 14^{th} and 16^{th} aspect, can, according to certain embodiments, comprise correlating different genetic sites to each other, e.g. in at least two, three, four, five, six, seven, eight, nine or ten genes. This way even higher statistical significance can be achieved.

[0172] According to certain embodiments of the method of the third aspect and related methods—as above, the second data set is provided by culturing the clinical isolates of Shigella species on agar plates provided with antimicrobial drugs, e.g. antibiotics, at different concentrations and the second data is obtained by taking the minimal concentration of the plates that inhibits growth of the respective Shigella species.

[0173] According to certain embodiments of the method of the third aspect and related methods, the antibiotic is at least one selected from the group of β-lactams, β-lactam inhibitors, quinolines and derivatives thereof, aminoglycosides, tetracyclines, and folate synthesis inhibitors, preferably Amoxicillin/K Clavulanate, Ampicillin, Aztreonam, Cefazolin, Cefepime, Cefotaxime, Ceftazidime, Ceftriaxone, Cefuroxime, Cephalothin, Ciprofloxacin, Ertapenem, Gentamicin, Imipenem, Levofloxacin, Meropenem, Piperacillin/Tazobactam, Ampicillin/Sulbactam, Tetracycline, Tobramycin, and Trimethoprim/Sulfamethoxazole.

[0174] According to certain embodiments of the method of the third aspect and related methods, the gene sequences in the third data set are comprised in at least one gene from the group of genes consisting of SSON53_12105, SSON53_12455, SSON53_12070, SSON53_12475, metH, SSON53_00425, SSON53_23830, SSON53_13575, flgE, SSON53_12500, SSON53_06660, SSON53_24790, SSON53_16770, SSON53_24480, SSON53_08770, SSON53_04795, SSON53_07430, SSON53_14085, SSON53_07440, SSON53_08950, SSON53_25555, SSON53_09145, SSON53_25565, SSON53_24780, SSON53_04400, SSON53_15280, rimO, SSON53_04930, SSON53_23390, rhaB, SSON53_17960, thiH, SSON53_03725, SSON53_09500, SSON53_25405, SSON53_13530, astD, SSON53_07945, SSON53_10080, SSON53_10655, SSON53_13400, SSON53_13555, SSON53_14945, SSON53_15285, fucI, SSON53_02755, SSON53_06415, SSON53_04615, SSON53_17330, and pdxA, or from the group of genes consisting of SSON53_12105, SSON53_12455, SSON53_12475, metH, SSON53_00425, SSON53_23830, SSON53_13575, flgE, SSON53_12500, SSON53_24790, SSON53_16770, SSON53_08770, SSON53_04795, SSON53_07430, SSON53_14085, SSON53_07440, SSON53_08950, SSON53_25555, SSON53_09145, SSON53_25565, SSON53_24780, SSON53_04400, SSON53_15280, SSON53_04930, SSON53_23390, rhaB, SSON53_17960, thiH, SSON53_03725, SSON53_09500, SSON53_25405, SSON53_13530, astD, SSON53_07945, SSON53_10080, SSON53_10655, SSON53_13400, SSON53_13555, SSON53_14945, SSON53_15285, fucI, SSON53_02755, SSON53_06415, SSON53_04615, SSON53_17330, pdxA, SSON53_04690, SSON53_04945, SSON53_06005, and SSON53_06085, or from the genes listed in Table 5.

[0175] According to certain embodiments of the method of the third aspect and related methods, the genetic sites in the genome of Shigella associated with antimicrobial drug, e.g. antibiotic, resistance are at least comprised in one gene from the group of genes consisting of SSON53_12105, SSON53_12455, SSON53_12475, metH, SSON53_00425, SSON53_23830, SSON53_13575, flgE, SSON53_12500, SSON53_24790, SSON53_16770, SSON53_08770, SSON53_04795, SSON53_07430, SSON53_14085, SSON53_07440, SSON53_08950, SSON53_25555, SSON53_09145, SSON53_25565, SSON53_24780, SSON53_04400, SSON53_15280, SSON53_04930, SSON53_23390, rhaB, SSON53_17960, thiH, SSON53_03725, SSON53_09500, SSON53_25405, SSON53_13530, astD, SSON53_07945, SSON53_10080, SSON53_10655, SSON53_13400, SSON53_13555, SSON53_14945, SSON53_15285, fucI, SSON53_02755, SSON53_06415, SSON53_04615, SSON53_17330, pdxA, SSON53_04690, SSON53_04945, SSON53_06005, and SSON53_06085.

[0176] According to certain embodiments of the method of the third aspect and related methods, the genetic variant has a point mutation, an insertion and or deletion of up to four bases, and/or a frameshift mutation, particularly a frameshift mutation in YP_005456953.1.

[0177] A fourth aspect of the present invention relates to a method of determining an antimicrobial drug, e.g. antibiotic, resistance profile for a bacterial microorganism belonging to the species Shigella comprising the steps of

[0178] a) obtaining or providing a sample containing or suspected of containing the bacterial microorganism;

[0179] b) determining the presence of a mutation in at least one gene of the bacterial microorganism as determined by the method of the third aspect of the invention;

[0180] wherein the presence of a mutation is indicative of a resistance to an antimicrobial drug, e.g. antibiotic, drug.

[0181] Steps a) and b) can herein be carried out as described with regard to the first aspect, as well as for the following aspects of the invention.

[0182] With this method, any mutations in the genome of Shigella species correlated with antimicrobial drug, e.g. antibiotic, resistance can be determined and a thorough antimicrobial drug, e.g. antibiotic, resistance profile can be established.

[0183] A fifth aspect of the present invention relates to a diagnostic method of determining an infection of a patient with Shigella species potentially resistant to antimicrobial drug treatment, which also can be described as method of determining an antimicrobial drug, e.g. antibiotic, resistant Shigella infection in a patient, comprising the steps of:

[0184] a) obtaining or providing a sample containing or suspected of containing a bacterial microorganism belonging to the species Shigella from the patient;

[0185] b) determining the presence of at least one mutation in at least one gene of the bacterial microorganism belonging to the species Shigella as determined by the method of the third aspect of the present invention, wherein the presence of said at least one mutation is indicative of an antimicrobial drug, e.g. antibiotic, resistant Shigella infection in said patient.

[0186] Again, steps a) and b) can herein be carried out as described with regard to the first aspect of the present invention.

[0187] According to this aspect, a Shigella infection in a patient can be determined using sequencing methods as well as a resistance to antimicrobial drugs, e.g. antibiotics, of the Shigella species be determined in a short amount of time compared to the conventional methods.

[0188] In a sixth aspect the present invention relates to a method of selecting a treatment of a patient suffering from an infection with a potentially resistant Shigella strain, e.g. an antimicrobial drug, e.g. antibiotic, resistant Shigella infection, comprising the steps of:

[0189] a) obtaining or providing a sample containing or suspected of containing a bacterial microorganism belonging to the species Shigella from the patient;

[0190] b) determining the presence of at least one mutation in at least one gene of the bacterial microorganism belonging to the species Shigella as determined by the method of the third aspect of the invention, wherein the presence of said at least one mutation is indicative of a resistance to one or more antimicrobial, e.g. antibiotic, drugs;

[0191] c) identifying said at least one or more antimicrobial, e.g. antibiotic, drugs; and

[0192] d) selecting one or more antimicrobial, e.g. antibiotic, drugs different from the ones identified in step c) and being suitable for the treatment of a Shigella infection.

[0193] This method can be carried out similarly to the second aspect of the invention and enables a fast was to select a suitable treatment with antibiotics for any infection with an unknown Shigella species.

[0194] A seventh aspect of the present invention relates to a method of acquiring, respectively determining, an antimicrobial drug, e.g. antibiotic, resistance profile for a bacterial microorganisms of Shigella species, comprising:

[0195] obtaining or providing a first data set of gene sequences of a clinical isolate of Shigella species;

[0196] providing a second data set of antimicrobial drug, e.g. antibiotic, resistance of a plurality of clinical isolates of Shigella species;

[0197] aligning the gene sequences of the first data set to at least one, preferably one, reference genome of Shigella, and/or assembling the gene sequence of the first data set, at least in part;

[0198] analyzing the gene sequences of the first data set for genetic variants to obtain a third data set of genetic variants of the first data set;

[0199] correlating the third data set with the second data set and statistically analyzing the correlation; and

[0200] determining the genetic sites in the genome of Shigella of the first data set associated with antimicrobial drug, e.g. antibiotic, resistance.

[0201] With this method, antimicrobial drug, e.g. antibiotic, resistances in an unknown isolate of Shigella can be determined.

[0202] According to certain embodiments, the reference genome of Shigella is NC_016822 as annotated at the NCBI. According to certain embodiments, statistical analysis in the present methods is carried out using Fisher's test with p<10⁻⁶, preferably p<10⁻⁹, particularly p<10⁻¹⁰. Also, according to certain embodiments, the method further comprises correlating different genetic sites to each other, e.g. in at least two, three, four, five, six, seven, eight, nine or ten genes.

[0203] An eighth aspect of the present invention relates to a computer program product comprising computer executable instructions which, when executed, perform a method according to the third, fourth, fifth, sixth or seventh aspect of the present invention.

[0204] In certain embodiments the computer program product is one on which program commands or program codes of a computer program for executing said method are stored. According to certain embodiments the computer program product is a storage medium. The same applies to the computer program products of the aspects mentioned afterwards, i.e. the twelfth and fifteenth aspect of the present invention. As noted above, the computer program products of the present invention can be self-learning, e.g. with respect to the first and second data sets.

[0205] In order to obtain the best possible information from the highly complex genetic data and develop an optimum model for diagnostic and therapeutical uses as well as the methods of the present invention—which can be applied stably in clinical routine—a thorough in-silico analysis can be necessary. The proposed principle is based on a combination of different approaches, e.g. alignment with at least one, preferably more reference genomes and/or assembly of the genome and correlation of mutations found in every sample, e.g. from each patient, with all references and drugs, e.g. antibiotics, and search for mutations which occur in several drug and several strains.

[0206] Using the above steps a list of mutations as well of genes is generated. These can be stored in databases and statistical models can be derived from the databases. The statistical models can be based on at least one or more mutations at least one or more genes. Statistical models that can be trained can be combined from mutations and genes. Examples of algorithms that can produce such models are association Rules, Support Vector Machines, Decision Trees, Decision Forests, Discriminant-Analysis, Cluster-Methods, and many more.

[0207] The goal of the training is to allow a reproducible, standardized application during routine procedures.

[0208] For this, for example, a genome or parts of the genome of a microorganism can be sequenced from a patient to be diagnosed. Afterwards, core characteristics can be derived from the sequence data, which can be used to predict resistance. These are the points in the database used for the final model, i.e. at least one mutation or at least one gene, but also combinations of mutations, etc.

[0209] The corresponding characteristics can be used as input for the statistical model and thus enable a prognosis for new patients. Not only the information regarding all resistances of all microorganisms, e.g. of Shigella species, against all drugs, e.g. antibiotics, can be integrated in a computer decision support tool, but also corresponding directives (e.g. EUCAST) so that only treatment proposals are made that are in line with the directives.

[0210] A ninth aspect of the present invention relates to the use of the computer program product according to the eighth aspect for acquiring an antimicrobial drug, e.g. antibiotic, resistance profile for bacterial microorganisms of Shigella species or in a method of the third aspect of the invention.

[0211] According to a tenth aspect, the present invention relates to a method of acquiring, respectively determining, an antimicrobial drug, e.g. antibiotic, resistance profile for a microorganism, particularly a bacterial microorganism, comprising:

[0212] obtaining or providing a first data set of gene sequences of a clinical isolate of the microorganism;

[0213] providing a second data set of antimicrobial drug, e.g. antibiotic resistance, of a plurality of clinical isolates of the microorganism;

[0214] aligning the gene sequences of the first data set to at least one, preferably one, reference genome of the microorganism, and/or assembling the gene sequences of the first data set, at least in part;

[0215] analyzing the gene sequences of the first data set for genetic variants to obtain a third data set of genetic variants of the first data set;

[0216] correlating the third data set with the second data set of antimicrobial drug, e.g. antibiotic, resistance of a plurality of clinical isolates of the microorganism and statistically analyzing the correlation; and

[0217] determining the genetic sites in the genome of the clinical isolate of the microorganism of the first data set associated with antimicrobial drug, e.g. antibiotic, resistance.

[0218] Again, the steps can be carried out as described for corresponding steps in other aspects before. This method describes the general concept of acquiring an antimicrobial drug, e.g. antibiotic, resistance profile for any microorganism.

[0219] According to an eleventh aspect, a method of acquiring, respectively determining, an antimicrobial drug, e.g. antibiotic, resistance profile for at least one microorganism, particularly at least one bacterial microorganism, obtained from a patient, comprising:

[0220] acquiring a first data set of gene sequences of the at least one microorganism;

[0221] providing at least one second data set of antimicrobial drug, e.g. antibiotic, resistance, of a plurality of clinical isolates of the microorganism;

[0222] aligning the gene sequences of the first data set to at least one, preferably one, reference genome of the microorganism, and/or assembling the gene sequence of the first data set, at least in part;

[0223] analyzing the gene sequences of the first data set for genetic variants to obtain a third data set of genetic variants of the first data set;

[0224] correlating the third data set with the at least one second data set of antimicrobial drug, e.g. antibiotic, resistance of a plurality of clinical isolates of the microorganism and statistically analyzing the correlation; and

[0225] determining the genetic sites in the genome of the at least one microorganism of the first data set associated with antimicrobial drug, e.g. antibiotic, resistance is described.

[0226] Again, the steps defined can be carried out as similar steps described in other methods before. This method discloses the general identification of antimicrobial drug, e.g. antibiotic, resistances in any sample, particularly by a general computer program product.

[0227] A simple read out concept for a diagnostic test as described in this aspect is shown schematically in FIG. 1.

[0228] According to FIG. 1, a sample 1, e.g. blood from a patient, is used for molecular testing 2, e.g. using next generation sequencing (NGS), and then a molecular fingerprint 3 is taken, e.g. in case of NGS a sequence of selected genomic/plasmid regions or the whole genome is assembled. This is then compared to a reference library 4, i.e. selected sequences or the whole sequence are/is compared to one or more reference sequences, and mutations (SNPs, sequence—gene additions/deletions, etc.) are correlated with susceptibility/reference profile of reference strains in the reference library. The reference library 4 herein contains many genomes and is different from a reference genome. Then the result 5 is reported comprising ID (pathogen identification), i.e. a list of all (pathogenic) species identified in the sample, and AST (antimicrobial susceptibility testing), i.e. a list including a susceptibility/resistance profile for all species listed

[0229] According to certain embodiments, statistical analysis in the present method is carried out using Fisher's test with p<10⁻⁶, preferably p<10⁻⁹, particularly p<10⁻¹⁰. Also, according to certain embodiments, the method further comprises correlating different genetic sites to each other.

[0230] A twelfth aspect of the present invention relates to a computer program product comprising computer executable instructions which, when executed, perform a method according to the 10^{th} or 11^{th} aspect of the present invention. These computer program products thus relate to general computer program products referring to any microorganisms, applying the principles which also apply for microorganisms of Shigella species as laid out before.

[0231] According to a thirteenth aspect the use of the computer program products of the thirteenth aspect in a method of the first, second, fourth, fifth or sixth aspect is disclosed.

[0232] In a fourteenth aspect a method of selecting a treatment of a patient having an infection with a microorganism, preferably a bacterial microorganism, particularly preferably a bacterial microorganism of Shigella species, comprising:

[0233] obtaining or providing a first data set comprising a gene sequence of at least one clinical isolate of the microorganism from the patient;

[0234] providing a second data set of antimicrobial drug, e.g. antibiotic, resistance of a plurality of clinical isolates of the microorganism;

[0235] aligning the gene sequences of the first data set to at least one, preferably one, reference genome of the microorganism, and/or assembling the gene sequence of the first data set, at least in part;

[0236] analyzing the gene sequences of the first data set for genetic variants to obtain a third data set of genetic variants of the first data set;

[0237] correlating the third data set with the second data set of antimicrobial drug, e.g. antibiotic, resistance of a plurality of clinical isolates of the microorganism and statistically analyzing the correlation;

[0238] determining the genetic sites in the genome of the clinical isolate of the microorganism of the first data set associated with antimicrobial drug, e.g. antibiotic, resistance; and

[0239] selecting a treatment of the patient with one or more antimicrobial, e.g. antibiotic, drugs different from the ones identified in the determination of the genetic sites associated with antimicrobial drug, e.g. antibiotic, resistance is disclosed.

[0240] Again, the steps can be carried out as similar steps before. In this method, as well as similar ones, no aligning is necessary, as the unknown sample can be directly correlated, after the genome or genome sequences are produced, with the second data set and thus mutations and antimicrobial drug, e.g. antibiotic, resistances can be determined. The first data set can be assembled, for example, using known techniques.

[0241] According to certain embodiments, statistical analysis in the present method is carried out using Fisher's test with p<10⁻⁶, preferably p<10⁻⁹, particularly p<10⁻¹⁰. Also, according to certain embodiments, the method further comprises correlating different genetic sites to each other.

[0242] A fifteenth aspect of the present invention is directed to a computer program product comprising computer executable instructions which, when executed, perform a method according to the fourteenth aspect.

[0243] In a sixteenth aspect the present invention relates to a method of finding a pharmaceutical target for treating an infection with at least one microorganism, particularly at least one bacterial microorganism, comprising:

[0244] obtaining or providing a first data set of gene sequences of a plurality of clinical isolates of the at least one microorganism;

[0245] providing a second data set of sequences of the at least one microorganism representing genes relevant to a pharmaceutical compound;

[0246] aligning the gene sequences of the first data set to at least one, preferably one, reference genome each of the at least one microorganism, and/or assembling the gene sequence of the first data set, at least in part;

[0247] analyzing the gene sequences of the first data set for genetic variants to obtain a third data set of genetic variants of the first data set;

[0248] correlating the third data set to the second data set of sequences of the at least one microorganism representing genes relevant to a pharmaceutical compound; and

[0249] determining the genetic sites in the genome of the clinical isolate of the microorganism of the first data set associated relevant to a pharmaceutical compound.

[0250] According to certain embodiments the sequences of the microorganism representing genes relevant to a pharmaceutical compound represent binding sites of the microorganism. These are likely to be targets for drugs, e.g. antibiotics.

[0251] Again, the principle of the method can be conducted using a computer program product.

[0252] Algorithms that can be used in such a computer program product showed for cases of single base exchanges (e.g. gyrase) as well as deletion of whole genes or open reading frames (e.g. beta lactamase) that known targets for drugs applied successfully on the marked can be found. It is to be expected that the data is perfectly suitable for finding further drug targets/pharmaceutical targets (many different organisms that are not monoclonal but very diverse in temporal and geographical aspects). For this purpose it can be tested for all highly significant mutations if the mutation is in a gene relevant for drugs, e.g. the binding site of a medicine). The results are of diagnostic interest. The findings can be prioritized. For example, for single base exchanges preferably results will be considered which are in binding sites. The respective binding sites most likely have a function in the metabolism of the drug, so that a mutation will cause an increased or decreased or lost effectiveness. Corresponding genes or even binding partners of the genes present presumed new targets for drugs, which can enhance effects of existing therapies or work as single therapies.

[0253] In order to limit the number of candidates, all proteins with unknown function or hypothetical proteins can be excluded, concentrating on genes that are found in several organisms, e.g. more than ten, independently of one another.

[0254] According to a seventeenth aspect of the present invention, a diagnostic method of determining an infection of a patient with Shigella species potentially resistant to antimicrobial drug treatment, which can also be described as a method of determining an antimicrobial drug, e.g. antibiotic, resistant Shigella infection of a patient is disclosed, comprising the steps of:

[0255] a) obtaining or providing a sample containing or suspected of containing at least one Shigella species from the patient;

[0256] b) determining the presence of at least one mutation in at least two genes from the group of genes listed in Table 5, wherein the presence of said at least two mutations is indicative of an antimicrobial drug, e.g. antibiotic, resistant Shigella infection in said patient.

[0257] An eighteenth aspect of the invention discloses a method of selecting a treatment of a patient suffering from an antimicrobial drug, e.g. antibiotic, resistant Shigella infection, comprising the steps of:

[0258] a) obtaining or providing a sample containing or suspected of containing at least one Shigella species from the patient;

[0259] b) determining the presence of at least one mutation in at least two genes from the group of genes listed in Table 5, wherein the presence of said at least two mutations is indicative of a resistance to one or more antimicrobial, e.g. antibiotic, drugs;

[0260] c) identifying said at least one or more antimicrobial, e.g. antibiotic, drugs; and

[0261] d) selecting one or more antimicrobial, e.g. antibiotic, drugs different from the ones identified in step c) and being suitable for the treatment of a Shigella infection.

[0262] Again, the steps can be carried out as in similar methods before, e.g. as in the first and second aspect of the invention. In the seventeenth and eighteenth aspect of the invention, as well as also in the twenty-third aspect of the invention, all classes of antibiotics considered in the present method are covered.

[0263] Herein, the genes in Table 5 are the following: SSON53_16770, SSON53_19730, SSON53_14680, SSON53_09620, SSON53_25600, metH, SSON53_24790, SSON53_13530, SSON53_12100, SSON53_12655, SSON53_04070, SSON53_21285, SSON53_01970, held, SSON53_08660, SSON53_14430, SSON53_17515, SSON53_11020, SSON53_00015, SSON53_01080, SSON53_12830, SSON53_13420, SSON53_13780, SSON53_16000, SSON53_16880, SSON53_18540, SSON53_22785, SSON53_24145, SSON53_25200, SSON53_25460, SSON53_03770, SSON53_18890, SSON53_16535, SSON53_19285, SSON53_03650, SSON53_15285, SSON53_18775, SSON53_17120, SSON53_24410, SSON53_26285, tig, SSON53_07220, SSON53_08070, SSON53_17780, gcvT, SSON53_20935, pyrB, SSON53_12595, SSON53_04605, SSON53_07910, SSON53_13390, queF, SSON53_18505, pdxA, SSON53_00645, SSON53_01515, SSON53_02505, SSON53_03060, dpiB, SSON53_03230, SSON53_03255, SSON53_04495, SSON53_05165, SSON53_05595, SSON53_06535, SSON53_06585, SSON53_07385, SSON53_07390, SSON53_08640, SSON53_08945, SSON53_10840, SSON53_12340, pbpG, SSON53_13270, SSON53_14190, SSON53_14265, SSON53_14460, murP, SSON53_14705, SSON53_14835, SSON53_15125, SSON53_16590, SSON53_16955, rumA, recD, SSON53_17670, SSON53_17690, SSON53_17705, SSON53_17955, SSON53_18080, SSON53_18610, SSON53_18735, SSON53_18885, SSON53_00360, thiP, SSON53_00595, SSON53_02980, SSON53_03520, SSON53_03560, bioD, SSON53_04325, SSON53_04710, putA, SSON53_05585, rne, SSON53_07205, SSON53_08060, SSON53_08955, SSON53_08960, SSON53_09205, SSON53_10160, SSON53_11100, dacD, SSON53_13065, fadJ, SSON53_14085, SSON53_14455, murQ, SSON53_16065, SSON53_16755, SSON53_18520, SSON53_20320, SSON53_21970, fadB, SSON53_24280, SSON53_25150, SSON53_25295, SSON53_25400, SSON53_00025, SSON53_04285, SSON53_04300, SSON53_06415, SSON53_07990, SSON53_08770, SSON53_09680, SSON53_10655, SSON53_11810, SSON53_12330, SSON53_12740, SSON53_12795, SSON53_13290, SSON53_13415, SSON53_13555, SSON53_15280, SSON53_16180, SSON53_19150, SSON53_22470, SSON53_24775, SSON53_24780, SSON53_02695, SSON53_04540, wcaD, SSON53_14020, SSON53_14025, SSON53_21860, and SSON53_22935.

[0264] According to certain embodiments, mutations in at least two, three, four, five, six, seven, eight, nine or ten genes are determined in any of the methods of the present invention, e.g. in at least two genes or in at least three genes. Instead of testing only single genes or mutants, a combination of several variant positions can improve the prediction accuracy and further reduce false positive findings that are influenced by other factors. Therefore, it is in particular preferred to determine the presence of a mutation in 2, 3, 4, 5, 6, 7, 8 or 9 (or more) genes selected from Table 5.

TABLE 5
List of genes

| | | | | | |
|---|---|---|---|---|---|
| SSON53_16770 | SSON53_19730 | SSON53_14680 | SSON53_09620 | SSON53_25600 | metH |
| SSON53_24790 | SSON53_13530 | SSON53_12100 | SSON53_12655 | SSON53_04070 | SSON53_21285 |
| SSON53_01970 | helD | SSON53_08660 | SSON53_14430 | SSON53_17515 | SSON53_11020 |
| SSON53_00015 | SSON53_01080 | SSON53_12830 | SSON53_13420 | SSON53_13780 | SSON53_16000 |
| SSON53_16880 | SSON53_18540 | SSON53_22785 | SSON53_24145 | SSON53_25200 | SSON53_25460 |
| SSON53_03770 | SSON53_18890 | SSON53_16535 | SSON53_19285 | SSON53_03650 | SSON53_15285 |
| SSON53_18775 | SSON53_17120 | SSON53_24410 | SSON53_26285 | tig | SSON53_07220 |
| SSON53_08070 | SSON53_17780 | gcvT | SSON53_20935 | pyrB | SSON53_12595 |
| SSON53_04605 | SSON53_07910 | SSON53_13390 | queF | SSON53_18505 | pdxA |
| SSON53_00645 | SSON53_01515 | SSON53_02505 | SSON53_03060 | dpiB | SSON53_03230 |
| SSON53_03255 | SSON53_04495 | SSON53_05165 | SSON53_05595 | SSON53_06535 | SSON53_06585 |
| SSON53_07385 | SSON53_07390 | SSON53_08640 | SSON53_08945 | SSON53_10840 | SSON53_12340 |
| pbpG | SSON53_13270 | SSON53_14190 | SSON53_14265 | SSON53_14460 | murP |
| SSON53_14705 | SSON53_14835 | SSON53_15125 | SSON53_16590 | SSON53_16955 | rumA |
| recD | SSON53_17670 | SSON53_17690 | SSON53_17705 | SSON53_17955 | SSON53_18080 |
| SSON53_18610 | SSON53_18735 | SSON53_18885 | SSON53_00360 | thiP | SSON53_00595 |
| SSON53_02980 | SSON53_03520 | SSON53_03560 | bioD | SSON53_04325 | SSON53_04710 |
| putA | SSON53_05585 | rne | SSON53_07205 | SSON53_08060 | SSON53_08955 |
| SSON53_08960 | SSON53_09205 | SSON53_10160 | SSON53_11100 | dacD | SSON53_13065 |
| fadJ | SSON53_14085 | SSON53_14455 | murQ | SSON53_16065 | SSON53_16755 |
| SSON53_18520 | SSON53_20320 | SSON53_21970 | fadB | SSON53_24280 | SSON53_25150 |
| SSON53_25295 | SSON53_25400 | SSON53_00025 | SSON53_04285 | SSON53_04300 | SSON53_06415 |
| SSON53_07990 | SSON53_08770 | SSON53_09680 | SSON53_10655 | SSON53_11810 | SSON53_12330 |
| SSON53_12740 | SSON53_12795 | SSON53_13290 | SSON53_13415 | SSON53_13555 | SSON53_15280 |
| SSON53_16180 | SSON53_19150 | SSON53_22470 | SSON53_24775 | SSON53_24780 | SSON53_02695 |
| SSON53_04540 | wcaD | SSON53_14020 | SSON53_14025 | SSON53_21860 | SSON53_22935 |

[0265] Further, according to certain embodiments, the reference genome of Shigella is again NC_016822 as annotated at the NCBI. According to certain embodiments, statistical analysis in the present methods is carried out using Fisher's test with p<10⁻⁶, preferably p<10⁻⁹, particularly p<10⁻¹⁰. Also, according to certain embodiments, the method further comprises correlating different genetic sites to each other. Also the other aspects of the embodiments of the first and second aspect of the invention apply.

[0266] According to certain embodiments of the method of the seventeenth and/or eighteenth aspect of the present invention, as well as also of the twenty-third aspect of the present invention, the antimicrobial drug is an antibiotic. According to certain embodiments, the antibiotic is a lactam antibiotic and a mutation in at least one of the genes listed in Table 6 or 7 is detected, or a mutation in at least one of the positions (denoted POS in the tables) listed in Table 6 or 7.

TABLE 6
List for lactam antibiotics (all 7 antibiotics)

| | | | p-value | genbank protein |
|---|---|---|---|---|
| gene name | POS | antibiotic | (FDR) | accession number |
| SSON53_16770 | 3134050 | CF; CFZ; CRM; P/T; AM; A/S; AUG | 4.9931E−41 | YP_005457860.1 |
| SSON53_19730 | 3722816 | CF; CFZ; CRM; P/T; AM; A/S; AUG | 8.7799E−37 | YP_005458448.1 |
| SSON53_14680 | 2748494 | CF; CFZ; CRM; P/T; AM; A/S; AUG | 1.9267E−34 | YP_005457450.1 |
| SSON53_09620 | 1816305 | CF; CFZ; CRM; P/T; AM; A/S; AUG | 2.5314E−34 | YP_005456470.1 |
| SSON53_25600 | 4860933 | CF; CFZ; CRM; P/T; AM; A/S; AUG | 2.636E−33 | YP_005459592.1 |

FDR: determined according to FDR (Benjamini Hochberg) method

[0267] According to certain embodiments of the method of the seventeenth and/or eighteenth aspect of the present invention, as well as also of the twenty-third aspect of the present invention, the antibiotic is at least one of CF, CFZ, CRM, P/T, AM, A/S, and AUG and a mutation in at least one of the genes of SSON53_16770, SSON53_19730, SSON53_14680, SSON53_09620, SSON53_25600 is detected, or a mutation in at least one of the positions of 3134050, 3722816, 2748494, 1816305, 4860933.

TABLE 7
List for lactam antibiotics (6 antibiotics)

| | | | p-value | genbank protein |
|---|---|---|---|---|
| gene name | POS | antibiotic | (FDR) | accession number |
| metH | 4595667 | CF; TE; A/S; CRM; P/T; AM; AUG | 9.1881E−42 | YP_005459323.1 |
| SSON53_24790 | 4707429 | CF; TE; A/S; CRM; P/T; AM; AUG | 4.3278E−41 | YP_005459432.1 |
| SSON53_13530 | 2533894 | CF; TE; A/S; CRM; P/T; AM; AUG | 8.4286E−40 | YP_005457233.1 |
| SSON53_12100 | 2239494 | CF; TE; A/S; CRM; P/T; AM; AUG | 1.7469E−38 | YP_005456952.1 |
| SSON53_12655 | 2352355 | CF; TE; A/S; CRM; P/T; AM; AUG | 3.1716E−38 | YP_005457061.1 |
| SSON53_04070 | 802768 | CF; TE; A/S; CRM; P/T; AM; AUG | 4.3241E−32 | YP_005455388.1 |
| SSON53_21285 | 4005875 | CF; TE; A/S; CRM; P/T; AM; AUG | 2.6354E−27 | YP_005458753.1 |
| SSON53_01970 | 399928 | CF; TE; CFZ; CRM; AM; A/S; AUG | 1.7083E−26 | YP_005454973.1 |
| helD | 1045235 | CF; TE; CFZ; CRM; AM; A/S; AUG | 1.7083E−26 | YP_005455617.1 |
| SSON53_08660 | 1633619 | CF; TE; CFZ; CRM; AM; A/S; AUG | 1.7083E−26 | YP_005456280.1 |
| SSON53_14430 | 2697830 | CF; TE; CFZ; CRM; AM; A/S; AUG | 1.7083E−26 | YP_005457402.1 |
| SSON53_17515 | 3283400 | CF; TE; CFZ; CRM; AM; A/S; AUG | 1.7083E−26 | YP_005458007.1 |
| SSON53_11020 | 2053683 | CF; TE; CFZ; CRM; AM; A/S; AUG | 2.0794E−26 | YP_005456742.1 |
| SSON53_00015 | 3915 | CF; TE; CFZ; CRM; AM; A/S; AUG | 2.2002E−26 | YP_005454592.1 |
| SSON53_01080 | 226692 | CF; TE; CFZ; CRM; AM; A/S; AUG | 2.2002E−26 | YP_005454803.1 |

[0268] According to certain embodiments of the method of the seventeenth and/or eighteenth aspect of the present invention, as well as also of the twenty-third aspect of the present invention, the antibiotic is at least one of CF, A/S, CRM, AM, and AUG and a mutation in at least one of the genes of metH, SSON53_24790, SSON53_13530, SSON53_12100, SSON53_12655, SSON53_04070, SSON53_21285, SSON53_01970, held, SSON53_08660, SSON53_14430, SSON53_17515, SSON53_11020, SSON53_00015, SSON53_01080 is detected, or a mutation in at least one of the positions of 4595667, 4707429, 2533894, 2239494, 2352355, 802768, 4005875, 399928, 1045235, 1633619, 2697830, 3283400, 2053683, 3915, 226692.

[0269] According to certain embodiments of the method of the seventeenth and/or eighteenth aspect of the present invention, as well as also of the twenty-third aspect of the present invention, the antibiotic is P/T_and a mutation in at least one of the genes of metH, SSON53_24790, SSON53_13530, SSON53_12100, SSON53_12655, SSON53_04070, SSON53_21285 is detected, or a mutation in at least one of the positions of 4595667, 4707429, 2533894, 2239494, 2352355, 802768, 4005875.

[0270] According to certain embodiments of the method of the seventeenth and/or eighteenth aspect of the present invention, as well as also of the twenty-third aspect of the present invention, the antibiotic is CFZ and a mutation in at least one of the genes of SSON53_01970, held, SSON53_08660, SSON53_14430, SSON53_17515, SSON53_11020, SSON53_00015, SSON53_01080 is detected, or a mutation in at least one of the positions of 399928, 1045235, 1633619, 2697830, 3283400, 2053683, 3915, 226692.

[0271] According to certain embodiments of the method of the seventeenth and/or eighteenth aspect of the present invention, as well as also of the twenty-third aspect of the present invention, the antibiotic is a quinolone antibiotic and a mutation in at least one of the genes listed in Table 8 or 9 is detected, or a mutation in at least one of the positions (denoted POS in the tables) listed in Table 8 or 9.

TABLE 8
List for quinolone antibiotics (all 2)

| | | | p-value | genbank protein |
|---|---|---|---|---|
| gene name | POS | drug | (FDR) | accession number |
| SSON53_04605 | 905340 | CP; | 4.0068E−10 | YP_005455495.1 |
| | | LVX | | |
| SSON53_07910 | 1506051 | CP; | 4.2234E−10 | YP_005456134.1 |
| | | LVX | | |
| SSON53_13390 | 2503366 | CP; | 3.9244E−10 | YP_005457205.1 |
| | | LVX | | |
| queF | 3228225 | CP; | 3.9244E−10 | YP_005457963.1 |
| | | LVX | | |
| SSON53_18505 | 3476068 | CP; | 3.9244E−10 | YP_005458205.1 |
| | | LVX | | |

[0272] According to certain embodiments of the method of the seventeenth and/or eighteenth aspect of the present invention, as well as also of the twenty-third aspect of the present invention, the antibiotic is at least one of CP and LVX and a mutation in at least one of the genes of SSON53_04605, SSON53_07910, SSON53_13390, queF, SSON53_18505 is detected, or a mutation in at least one of the positions of 905340, 1506051, 2503366, 3228225, 3476068.

TABLE 9
List for quinolone antibiotics (1 antibiotic)

| | | | | genbank |
|---|---|---|---|---|
| | | | | protein |
| | | | p-value | accession |
| gene name | POS | drug | (FDR) | number |
| SSON53_13390 | 2503749 | CP | 3.4593E−31 | YP_005457205.1 |
| SSON53_19730 | 3723920 | CP | 2.2396E−13 | YP_005458448.1 |
| SSON53_19730 | 3723919 | CP | 8.7463E−13 | YP_005458448.1 |
| SSON53_19730 | 3723923 | CP | 8.7463E−13 | YP_005458448.1 |
| SSON53_19730 | 3723925 | CP | 1.2893E−12 | YP_005458448.1 |
| SSON53_16955 | 3164176 | CP | 2.7682E−12 | YP_005457897.1 |
| SSON53_05595 | 1110022 | CP | 3.7569E−12 | YP_005455683.1 |
| SSON53_07390 | 1422899 | CP | 4.7319E−12 | YP_005456032.1 |
| SSON53_15125 | 2846241 | CP | 4.8574E−12 | YP_005457535.1 |
| dpiB | 619830 | T/S; CP | 8.2584E−12 | YP_005455196.1 |
| SSON53_07385 | 1421710 | CP | 9.2316E−12 | YP_005456031.1 |
| SSON53_17670 | 3315886 | CP | 1.7472E−11 | YP_005458038.1 |
| SSON53_14460 | 2704526 | T/S; CP | 3.1286E−11 | YP_005457408.1 |
| SSON53_19730 | 3722696 | CP | 3.6609E−11 | YP_005458448.1 |
| SSON53_21860 | 4105284 | T/S; CP | 4.6957E−11 | YP_005458864.1 |

[0273] According to certain embodiments of the method of the seventeenth and/or eighteenth aspect of the present invention, as well as also of the twenty-third aspect of the present invention, the antibiotic is CP and a mutation in at least one of the genes of SSON53_13390, SSON53_19730, SSON53_16955, SSON53_05595, SSON53_07390, SSON53_15125, dpiB, SSON53_07385, SSON53_17670, SSON53_14460, SSON53_21860 is detected, or a mutation in at least one of the positions of 2503749, 3723920, 3723919, 3723923, 3723925, 3164176, 1110022, 1422899, 2846241, 619830, 1421710, 3315886, 2704526, 3722696, 4105284.

[0274] According to certain embodiments of the method of the seventeenth and/or eighteenth aspect of the present invention, as well as also of the twenty-third aspect of the present invention, the antibiotic is an aminoglycoside antibiotic and a mutation in at least one of the genes listed in Table 10 is detected, or a mutation in at least one of the positions (denoted POS in the tables) listed in Table 10.

TABLE 10
List of aminoglycoside antibiotics

| | | | p-value | genbank protein |
|---|---|---|---|---|
| gene name | POS | drug | (FDR) | accession number |
| SSON53_04325 | 847461 | TO | 5.1737E−12 | YP_005455439.1 |
| SSON53_04710 | 927380 | TO | 5.1737E−12 | YP_005455516.1 |
| SSON53_14455 | 2702371 | TO | 5.1737E−12 | YP_005457407.1 |
| SSON53_16755 | 3130278 | TO | 5.1737E−12 | YP_005457857.1 |
| SSON53_03520 | 707965 | TO | 5.294E−12 | YP_005455281.1 |
| SSON53_16065 | 3013091 | TO | 5.294E−12 | YP_005457721.1 |
| SSON53_00360 | 74735 | TO | 1.7111E−11 | YP_005454661.1 |
| SSON53_00595 | 124368 | TO | 1.7111E−11 | YP_005454708.1 |
| SSON53_25150 | 4777150 | TO | 1.7111E−11 | YP_005459502.1 |
| fadB | 4366586 | TO | 1.7908E−11 | YP_005459106.1 |
| SSON53_10160 | 1917725 | TO | 1.9527E−11 | YP_005456572.1 |
| SSON53_02980 | 600143 | TO | 2.5118E−11 | YP_005455173.1 |
| SSON53_02980 | 600209 | TO | 2.5118E−11 | YP_005455173.1 |
| SSON53_08960 | 1693067 | TO | 3.1643E−11 | YP_005456340.1 |
| SSON53_03560 | 714500 | TO | 5.1292E−11 | YP_005455289.1 |

[0275] According to certain embodiments of the method of the seventeenth and/or eighteenth aspect of the present invention, as well as also of the twenty-third aspect of the present invention, the antibiotic is TO and a mutation in at least one of the genes of SSON53_04325, SSON53_04710, SSON53_14455, SSON53_16755, SSON53_03520, SSON53_16065, SSON53_00360, SSON53_00595, SSON53_25150, fadB, SSON53_10160, SSON53_02980, SSON53_02980, SSON53_08960, SSON53_03560 is detected, or a mutation in at least one of the positions of 847461, 927380, 2702371, 3130278, 707965, 3013091, 74735, 124368, 4777150, 4366586, 1917725, 600143, 600209, 1693067, 714500.

[0276] According to certain embodiments of the method of the seventeenth and/or eighteenth aspect of the present invention, as well as also of the twenty-third aspect of the present invention, the antibiotic is an polyketide antibiotic and a mutation in at least one of the genes listed in Table 11 is detected, or a mutation in at least one of the positions (denoted POS in the tables) listed in Table 11.

TABLE 11
List of polyketides, preferably tetracycline

| | | | | genbank protein |
|---|---|---|---|---|
| | | | p-value | accession |
| gene name | POS | Drug | (FDR) | number |
| metH | 4595667 | CF; TE; A/S; CRM; P/T; AM; AUG | 9.1881E−42 | YP_005459323.1 |
| SSON53_24790 | 4707429 | CF; TE; A/S; CRM; P/T; AM; AUG | 4.3278E−41 | YP_005459432.1 |
| SSON53_08770 | 1655745 | CF; TE; A/S; CRM; P/T; AM | 6.6062E−41 | YP_005456302.1 |
| SSON53_08770 | 1655894 | CF; TE; A/S; CRM; P/T; AM | 6.6062E−41 | YP_005456302.1 |
| SSON53_24780 | 4705326 | CF; TE; A/S; CRM; P/T; AM | 1.2525E−40 | YP_005459430.1 |
| SSON53_15280 | 2876708 | CF; TE; A/S; CRM; P/T; AM | 1.7165E−40 | YP_005457566.1 |
| SSON53_10655 | 1990704 | CF; TE; A/S; CRM; P/T; AM | 3.7364E−40 | YP_005456671.1 |
| SSON53_13555 | 2539010 | CF; TE; A/S; CRM; P/T; AM | 3.7364E−40 | YP_005457238.1 |
| SSON53_06415 | 1257335 | CF; TE; A/S; CRM; P/T; AM | 3.8276E−40 | YP_005455839.1 |
| SSON53_04285 | 840523 | CF; TE; A/S; CRM; P/T; AM | 8.4286E−40 | YP_005455431.1 |
| SSON53_04300 | 842535 | CF; TE; A/S; CRM; P/T; AM | 8.4286E−40 | YP_005455434.1 |
| SSON53_13530 | 2533894 | CF; TE; A/S; CRM; P/T; AM; AUG | 8.4286E−40 | YP_005457233.1 |
| SSON53_13555 | 2539007 | CF; TE; A/S; CRM; P/T; AM | 8.4286E−40 | YP_005457238.1 |
| SSON53_19150 | 3604284 | CF; TE; A/S; CRM; P/T; AM | 8.4286E−40 | YP_005458332.1 |
| SSON53_24775 | 4703410 | CF; TE; A/S; CRM; P/T; AM | 3.6652E−39 | YP_005459429.1 |
| SSON53_12100 | 2239494 | CF; TE; A/S; CRM; P/T; AM; AUG | 1.7469E−38 | YP_005456952.1 |
| SSON53_12795 | 2378416 | CF; TE; A/S; CRM; P/T; AM | 1.8821E−38 | YP_005457089.1 |

[0277] According to certain embodiments of the method of the seventeenth and/or eighteenth aspect of the present invention, as well as also of the twenty-third aspect of the present invention, the antibiotic is TE and a mutation in at least one of the genes of metH, SSON53_24790, SSON53_08770, SSON53_24780, SSON53_15280, SSON53_10655, SSON53_13555, SSON53_06415, SSON53_04285, SSON53_04300, SSON53_13530, SSON53_19150, SSON53_24775, SSON53_12100, SSON53_12795 is detected, or a mutation in at least one of the positions of 4595667, 4707429, 1655745, 1655894, 4705326, 2876708, 1990704, 2539010, 1257335, 840523, 842535, 2533894, 2539007, 3604284, 4703410, 2239494, 2378416.

[0278] According to certain embodiments of the method of the seventeenth and/or eighteenth aspect of the present invention, as well as also of the twenty-third aspect of the present invention, the antibiotic is T/S and a mutation in at least one of the genes listed in Table 12 is detected, or a mutation in at least one of the positions (denoted POS in the tables) listed in Table 12.

TABLE 12
List of others antibiotics

| | | | p-value | genbank protein |
|---|---|---|---|---|
| gene name | POS | drug | (FDR) | accession number |
| SSON53_14020; | 2627369 | T/S; A/S; TE; AM | 7.9267E−18 | YP_005457324.1; |
| SN53_14025 (*) | | | | YP_005457325.1 |
| SSON53_04540 | 894506 | T/S; TE | 4.455E−15 | YP_005455482.1 |
| dpiB | 619830 | T/S; CP | 8.2584E−12 | YP_005455196.1 |
| SSON53_14460 | 2704526 | T/S; CP | 3.1286E−11 | YP_005457408.1 |
| SSON53_21860 | 4105284 | T/S; CP | 4.6957E−11 | YP_005458864.1 |
| SSON53_22935 | 4337358 | T/S; CP; AM | 5.9394E−11 | YP_005459075.1 |
| SSON53_17690 | 3320136 | T/S; CP | 1.8593E−10 | YP_005458042.1 |
| wcaD | 2292673 | T/S; TE | 1.9564E−10 | YP_005457009.1 |
| SSON53_17705 | 3327522 | T/S; CP | 2.0575E−10 | YP_005458045.1 |
| SSON53_02695 | 538074 | T/S | 2.62E−10 | YP_005455116.1 |

(*) the single nucleotide polymorphism in this case is in both genes

[0279] A nineteenth aspect of the present invention is directed to a diagnostic method of determining an infection of a patient with Shigella species potentially resistant to antimicrobial drug treatment, which can also be described as method of determining an antimicrobial drug, e.g. antibiotic, resistant Shigella infection of a patient, comprising the steps of:

[0280] a) obtaining or providing a sample containing or suspected of containing at least one Shigella species from the patient;

[0281] b) determining the presence of at least one mutation in at least one gene from the group of genes consisting of SSON53_12105, SSON53_12455, SSON53_12070, SSON53_12475, SSON53_00425, SSON53_23830, SSON53_13575, flgE, SSON53_12500, SSON53_06660, SSON53_24790, SSON53_16770, SSON53_24480, SSON53_08770, SSON53_04795, SSON53_07430, SSON53_14085, SSON53_07440, SSON53_08950, SSON53_25555, SSON53_09145, SSON53_25565, SSON53_24780, SSON53_04400, SSON53_15280, rimO, SSON53_04930, SSON53_23390, SSON53_17960, thiH, SSON53_03725, SSON53_09500, SSON53_25405, SSON53_13530, astD, SSON53_07945, SSON53_10080, SSON53_10655, SSON53_13400, SSON53_13555, SSON53_14945, SSON53_15285, SSON53_02755, SSON53_06415, SSON53_04615, SSON53_17330, and pdxA, or from the group of genes consisting of SSON53_12105, SSON53_12455, SSON53_12475, SSON53_00425, SSON53_23830, SSON53_13575, flgE, SSON53_12500, SSON53_24790, SSON53_16770, SSON53_08770, SSON53_04795, SSON53_07430, SSON53_14085, SSON53_07440, SSON53_08950, SSON53_25555, SSON53_09145, SSON53_25565, SSON53_24780, SSON53_04400, SSON53_15280, SSON53_04930, SSON53_23390, SSON53_17960, thiH, SSON53_03725, SSON53_09500, SSON53_25405, SSON53_13530, astD, SSON53_07945, SSON53_10080, SSON53_10655, SSON53_13400, SSON53_13555, SSON53_14945, SSON53_15285, SSON53_02755, SSON53_06415, SSON53_04615, SSON53_17330, pdxA, SSON53_04690, SSON53_04945, SSON53_06005, and SSON53_06085, wherein the presence of said at least one mutation is indicative of an antimicrobial drug, e.g. antibiotic, resistant Shigella infection in said patient.

[0282] A twentieth aspect of the present invention is directed to a method of selecting a treatment of a patient suffering from an antimicrobial drug, e.g. antibiotic, resistant Shigella infection, comprising the steps of:

[0283] a) obtaining or providing a sample containing or suspected of containing at least one Shigella species from the patient;

[0284] b) determining the presence of at least one mutation in at least one gene from the group of genes consisting of SSON53_12105, SSON53_12455, SSON53_12070, SSON53_12475, SSON53_00425, SSON53_23830, SSON53_13575, flgE, SSON53_12500, SSON53_06660, SSON53_24790, SSON53_16770, SSON53_24480, SSON53_08770, SSON53_04795, SSON53_07430, SSON53_14085, SSON53_07440, SSON53_08950, SSON53_25555, SSON53_09145, SSON53_25565, SSON53_24780, SSON53_04400, SSON53_15280, rimO, SSON53_04930, SSON53_23390, SSON53_17960, thiH, SSON53_03725, SSON53_09500, SSON53_25405, SSON53_13530, astD, SSON53_07945, SSON53_10080, SSON53_10655, SSON53_13400, SSON53_13555, SSON53_14945, SSON53_15285, SSON53_02755, SSON53_06415, SSON53_04615, SSON53_17330, and pdxA, or from the group of genes consisting of SSON53_12105, SSON53_12455, SSON53_12475, SSON53_00425, SSON53_23830, SSON53_13575, flgE, SSON53_12500, SSON53_24790, SSON53_16770, SSON53_08770, SSON53_04795, SSON53_07430, SSON53_14085, SSON53_07440, SSON53_08950, SSON53_25555, SSON53_09145, SSON53_25565, SSON53_24780, SSON53_04400, SSON53_15280, SSON53_04930, SSON53_23390, SSON53_17960, thiH, SSON53_03725, SSON53_09500, SSON53_25405, SSON53_13530, astD, SSON53_07945, SSON53_10080, SSON53_10655, SSON53_13400, SSON53_13555, SSON53_14945, SSON53_15285, SSON53_02755, SSON53_06415, SSON53_04615, SSON53_17330, pdxA, SSON53_04690, SSON53_04945, SSON53_06005, and SSON53_06085, wherein the presence of said at least one mutation is indicative of a resistance to one or more antimicrobial, e.g. antibiotic, drugs;

[0285] c) identifying said at least one or more antimicrobial, e.g. antibiotic, drugs; and

[0286] d) selecting one or more antimicrobial, e.g. antibiotic, drugs different from the ones identified in step c) and being suitable for the treatment of a Shigella infection.

[0287] Again, in the nineteenth and the twentieth aspect the steps correspond to those in the first or second aspect, although only a mutation in at least one gene is determined.

[0288] A twenty-first aspect of the present invention is directed to a method of treating a patient suffering from an antimicrobial drug, e.g. antibiotic, resistant Shigella infection, comprising the steps of:

[0289] a) obtaining or providing a sample containing or suspected of containing at least one Shigella species from the patient;

[0290] b) determining the presence of at least one mutation in at least one gene from the group of genes consisting of SSON53_12105, SSON53_12455, SSON53_12070, SSON53_12475, SSON53_00425, SSON53_23830, SSON53_13575, flgE, SSON53_12500, SSON53_06660, SSON53_24790, SSON53_16770, SSON53_24480, SSON53_08770, SSON53_04795, SSON53_07430, SSON53_14085, SSON53_07440, SSON53_08950, SSON53_25555, SSON53_09145, SSON53_25565, SSON53_24780, SSON53_04400, SSON53_15280, rimO, SSON53_04930, SSON53_23390, SSON53_17960, thiH, SSON53_03725, SSON53_09500, SSON53_25405, SSON53_13530, astD, SSON53_07945, SSON53_10080, SSON53_10655, SSON53_13400, SSON53_13555, SSON53_14945, SSON53_15285, SSON53_02755, SSON53_06415, SSON53_04615, SSON53_17330, and pdxA, or from the group of genes consisting of SSON53_12105, SSON53_12455, SSON53_12475, SSON53_00425, SSON53_23830, SSON53_13575, flgE, SSON53_12500, SSON53_24790, SSON53_16770, SSON53_08770, SSON53_04795, SSON53_07430, SSON53_14085, SSON53_07440, SSON53_08950, SSON53_25555, SSON53_09145, SSON53_25565, SSON53_24780, SSON53_04400, SSON53_15280, SSON53_04930, SSON53_23390, SSON53_17960, thiH, SSON53_03725, SSON53_09500, SSON53_25405, SSON53_13530, astD, SSON53_07945, SSON53_10080, SSON53_10655, SSON53_13400, SSON53_13555, SSON53_14945, SSON53_15285, SSON53_02755, SSON53_06415, SSON53_04615, SSON53_17330, pdxA, SSON53_04690, SSON53_04945, SSON53_06005, and SSON53_06085, wherein the presence of said at least one mutation is indicative of a resistance to one or more antimicrobial, e.g. antibiotic, drugs;

[0291] c) identifying said at least one or more antimicrobial, e.g. antibiotic, drugs;

[0292] d) selecting one or more antimicrobial, e.g. antibiotic, drugs different from the ones identified in step c) and being suitable for the treatment of a Shigella infection; and

[0293] e) treating the patient with said one or more antimicrobial, e.g. antibiotic, drugs.

[0294] A twenty-second aspect of the present invention is directed to method of treating a patient suffering from an antimicrobial drug, e.g. antibiotic, resistant Shigella infection, comprising the steps of:

[0295] a) obtaining or providing a sample containing or suspected of containing at least one Shigella species from the patient;

[0296] b) determining the presence of at least one mutation in at least two genes from the group of genes consisting of SSON53_12105, SSON53_12455, SSON53_12070, SSON53_12475, metH, SSON53_00425, SSON53_23830, SSON53_13575, flgE, SSON53_12500, SSON53_06660, SSON53_24790, SSON53_16770, SSON53_24480, SSON53_08770, SSON53_04795, SSON53_07430, SSON53_14085, SSON53_07440, SSON53_08950, SSON53_25555, SSON53_09145, SSON53_25565, SSON53_24780, SSON53_04400, SSON53_15280, rimO, SSON53_04930, SSON53_23390, rhaB, SSON53_17960, thiH, SSON53_03725, SSON53_09500, SSON53_25405, SSON53_13530, astD, SSON53_07945, SSON53_10080, SSON53_10655, SSON53_13400, SSON53_13555, SSON53_14945, SSON53_15285, fucI, SSON53_02755, SSON53_06415, SSON53_04615, SSON53_17330, and pdxA, or from the group of genes consisting of SSON53_12105, SSON53_12455, SSON53_12475, metH, SSON53_00425, SSON53_23830, SSON53_13575, flgE, SSON53_12500, SSON53_24790, SSON53_16770, SSON53_08770, SSON53_04795, SSON53_07430, SSON53_14085, SSON53_07440, SSON53_08950, SSON53_25555, SSON53_09145, SSON53_25565, SSON53_24780, SSON53_04400, SSON53_15280, SSON53_04930, SSON53_23390, rhaB, SSON53_17960, thiH, SSON53_03725, SSON53_09500, SSON53_25405, SSON53_13530, astD, SSON53_07945, SSON53_10080, SSON53_10655, SSON53_13400, SSON53_13555, SSON53_14945, SSON53_15285, fucI, SSON53_02755, SSON53_06415, SSON53_04615, SSON53_17330, pdxA, SSON53_04690, SSON53_04945, SSON53_06005, and SSON53_06085, wherein the presence of said at least two mutations is indicative of a resistance to one or more antimicrobial, e.g. antibiotic, drugs;

[0297] c) identifying said at least one or more antimicrobial, e.g. antibiotic, drugs;

[0298] d) selecting one or more antimicrobial, e.g. antibiotic, drugs different from the ones identified in step c) and being suitable for the treatment of a Shigella infection; and

[0299] e) treating the patient with said one or more antimicrobial, e.g. antibiotic, drugs.

[0300] A twenty-third aspect of the present invention is directed to a method of treating a patient suffering from an antimicrobial drug, e.g. antibiotic, resistant Shigella infection, comprising the steps of:

[0301] a) obtaining or providing a sample containing or suspected of containing at least one Shigella species from the patient;

[0302] b) determining the presence of at least one mutation in at least two genes from the group of genes listed in Table 5, wherein the presence of said at least two mutations is indicative of a resistance to one or more antimicrobial, e.g. antibiotic, drugs;

[0303] c) identifying said at least one or more antimicrobial, e.g. antibiotic, drugs;

[0304] d) selecting one or more antimicrobial, e.g. antibiotic, drugs different from the ones identified in step c) and being suitable for the treatment of a Shigella infection; and

[0305] e) treating the patient with said one or more antimicrobial, e.g. antibiotic, drugs.

[0306] A twenty-fourth aspect of the present invention is directed to a method of treating a patient suffering from an antimicrobial drug, e.g. antibiotic, resistant Shigella infection, comprising the steps of:

[0307] a) obtaining or providing a sample containing or suspected of containing at least one Shigella species from the patient;

[0308] b) determining the presence of at least one mutation in at least one gene from the group of genes listed in Table 13, preferably from the group of genes listed in Table 14, wherein the presence of said at least one mutation is indicative of a resistance to one or more antimicrobial, e.g. antibiotic, drugs;

[0309] c) identifying said at least one or more antimicrobial, e.g. antibiotic, drugs;

[0310] d) selecting one or more antimicrobial, e.g. antibiotic, drugs different from the ones identified in step c) and being suitable for the treatment of a Shigella infection; and

[0311] e) treating the patient with said one or more antimicrobial, e.g. antibiotic, drugs.

[0312] Also in the twenty-first to twenty-fourth aspect of the invention, steps a) to d) are analogous to the steps in the method of the second aspect of the present invention. Step e) can be sufficiently carried out without being restricted and can be done e.g. non-invasively.

[0313] A twenty-fifth aspect of the present invention is directed to a diagnostic method of determining an infection of a patient with Shigella species potentially resistant to antimicrobial drug treatment, which can also be described as method of determining an antimicrobial drug, e.g. antibiotic, resistant Shigella infection of a patient, comprising the steps of:

[0314] a) obtaining or providing a sample containing or suspected of containing at least one Shigella species from the patient;

[0315] b) determining the presence of at least one mutation in at least one gene from the group of genes listed in Table 13, preferably from the group of genes listed in Table 14, wherein the presence of said at least one mutation is indicative of an antimicrobial drug, e.g. antibiotic, resistant Shigella infection in said patient.

[0316] A twenty-sixth aspect of the present invention is directed to a method of selecting a treatment of a patient suffering from an antimicrobial drug, e.g. antibiotic, resistant Shigella infection, comprising the steps of:

[0317] a) obtaining or providing a sample containing or suspected of containing at least one Shigella species from the patient;

[0318] b) determining the presence of at least one mutation in at least one gene from the group of genes listed in Table 13, preferably from the group of genes listed in Table 14, wherein the presence of said at least one mutation is indicative of a resistance to one or more antimicrobial, e.g. antibiotic, drugs;

[0319] c) identifying said at least one or more antimicrobial, e.g. antibiotic, drugs; and

[0320] d) selecting one or more antimicrobial, e.g. antibiotic, drugs different from the ones identified in step c) and being suitable for the treatment of a Shigella infection.

[0321] Again, in the twenty-fifth and the twenty-sixth aspect the steps correspond to those in the first or second aspect, although only a mutation in at least one gene is determined.

TABLE 13
List of genes

| | | | | | |
|---|---|---|---|---|---|
| SSON53_16770 | SSON53_19730 | SSON53_14680 | SSON53_09620 | SSON53_25600 | SSON53_22935 |
| SSON53_24790 | SSON53_13530 | SSON53_12100 | SSON53_12655 | SSON53_04070 | SSON53_21285 |
| SSON53_01970 | wcaD | SSON53_08660 | SSON53_14430 | SSON53_17515 | SSON53_11020 |
| SSON53_00015 | SSON53_01080 | SSON53_12830 | SSON53_13420 | SSON53_13780 | SSON53_16000 |
| SSON53_16880 | SSON53_18540 | SSON53_22785 | SSON53_24145 | SSON53_25200 | SSON53_25460 |
| SSON53_03770 | SSON53_18890 | SSON53_16535 | SSON53_19285 | SSON53_03650 | SSON53_15285 |
| SSON53_18775 | SSON53_17120 | SSON53_24410 | SSON53_26285 | SSON53_14025 | SSON53_07220 |
| SSON53_08070 | SSON53_17780 | gcvT | SSON53_20935 | SSON53_21860 | SSON53_12595 |
| SSON53_04605 | SSON53_07910 | SSON53_13390 | queF | SSON53_18505 | pdxA |
| SSON53_00645 | SSON53_01515 | SSON53_02505 | SSON53_03060 | dpiB | SSON53_03230 |
| SSON53_03255 | SSON53_04495 | SSON53_05165 | SSON53_05595 | SSON53_06535 | SSON53_06585 |
| SSON53_07385 | SSON53_07390 | SSON53_08640 | SSON53_08945 | SSON53_10840 | SSON53_12340 |
| pbpG | SSON53_13270 | SSON53_14190 | SSON53_14265 | SSON53_14460 | murP |
| SSON53_14705 | SSON53_14835 | SSON53_15125 | SSON53_16590 | SSON53_16955 | rumA |
| recD | SSON53_17670 | SSON53_17690 | SSON53_17705 | SSON53_17955 | SSON53_18080 |
| SSON53_18610 | SSON53_18735 | SSON53_18885 | SSON53_00360 | thiP | SSON53_00595 |
| SSON53_02980 | SSON53_03520 | SSON53_03560 | bioD | SSON53_04325 | SSON53_04710 |
| SSON53_04540 | SSON53_05585 | rne | SSON53_07205 | SSON53_08060 | SSON53_08955 |
| SSON53_08960 | SSON53_09205 | SSON53_10160 | SSON53_11100 | dacD | SSON53_13065 |
| fadJ | SSON53_14085 | SSON53_14455 | murQ | SSON53_16065 | SSON53_16755 |
| SSON53_18520 | SSON53_20320 | SSON53_21970 | SSON53_14020 | SSON53_24280 | SSON53_25150 |
| SSON53_25295 | SSON53_25400 | SSON53_00025 | SSON53_04285 | SSON53_04300 | SSON53_06415 |
| SSON53_07990 | SSON53_08770 | SSON53_09680 | SSON53_10655 | SSON53_11810 | SSON53_12330 |
| SSON53_12740 | SSON53_12795 | SSON53_13290 | SSON53_13415 | SSON53_13555 | SSON53_15280 |
| SSON53_16180 | SSON53_19150 | SSON53_22470 | SSON53_24775 | SSON53_24780 | SSON53_02695 |

TABLE 14
List of genes

| | | | | | |
|---|---|---|---|---|---|
| SSON53_16770 | SSON53_19730 | SSON53_14680 | SSON53_09620 | SSON53_25600 | SSON53_22935 |
| SSON53_24790 | SSON53_13530 | SSON53_12100 | SSON53_12655 | SSON53_04070 | SSON53_21285 |
| SSON53_01970 | wcaD | SSON53_08660 | SSON53_14430 | SSON53_17515 | SSON53_11020 |
| SSON53_00015 | SSON53_01080 | SSON53_12830 | SSON53_13420 | SSON53_13780 | SSON53_16000 |
| SSON53_16880 | SSON53_18540 | SSON53_22785 | SSON53_24145 | SSON53_25200 | SSON53_25460 |
| SSON53_03770 | SSON53_18890 | SSON53_16535 | SSON53_19285 | SSON53_03650 | SSON53_15285 |
| SSON53_18775 | SSON53_17120 | SSON53_24410 | SSON53_26285 | SSON53_14025 | SSON53_07220 |
| SSON53_08070 | SSON53_17780 | gcvT | SSON53_20935 | SSON53_21860 | SSON53_12595 |
| SSON53_04605 | SSON53_07910 | SSON53_13390 | queF | SSON53_18505 | pdxA |
| SSON53_00645 | SSON53_01515 | SSON53_02505 | SSON53_03060 | dpiB | SSON53_03230 |
| SSON53_03255 | SSON53_04495 | SSON53_05165 | SSON53_05595 | SSON53_06535 | SSON53_06585 |
| SSON53_07385 | SSON53_07390 | SSON53_08640 | SSON53_08945 | SSON53_10840 | SSON53_12340 |
| SSON53_02695 | SSON53_13270 | SSON53_14190 | SSON53_14265 | SSON53_14460 | murP |
| SSON53_14705 | SSON53_14835 | SSON53_15125 | SSON53_16590 | SSON53_16955 | SSON53_22470 |
| SSON53_24780 | SSON53_17670 | SSON53_17690 | SSON53_17705 | SSON53_17955 | SSON53_18080 |
| SSON53_18610 | SSON53_18735 | SSON53_18885 | SSON53_00360 | thiP | SSON53_00595 |
| SSON53_02980 | SSON53_03520 | SSON53_03560 | bioD | SSON53_04325 | SSON53_04710 |
| SSON53_04540 | SSON53_05585 | rne | SSON53_07205 | SSON53_08060 | SSON53_08955 |
| SSON53_08960 | SSON53_09205 | SSON53_10160 | SSON53_11100 | SSON53_24775 | SSON53_13065 |
| fadJ | SSON53_14085 | SSON53_14455 | murQ | SSON53_16065 | SSON53_16755 |
| SSON53_18520 | SSON53_20320 | SSON53_21970 | SSON53_14020 | SSON53_24280 | SSON53_25150 |
| SSON53_25295 | SSON53_25400 | SSON53_00025 | SSON53_04285 | SSON53_04300 | SSON53_06415 |
| SSON53_07990 | SSON53_08770 | SSON53_09680 | SSON53_10655 | SSON53_11810 | SSON53_12330 |
| SSON53_12740 | SSON53_12795 | SSON53_13290 | SSON53_13415 | SSON53_13555 | SSON53_15280 |
| SSON53_16180 | SSON53_19150 | | | | |

### EXAMPLES

[0322] The present invention will now be described in detail with reference to several examples thereof. However, these examples are illustrative and do not limit the scope of the invention.

### Example 1

[0323] Whole genome sequencing was carried out in addition to classical antimicrobial susceptibility testing of the same isolates for a cohort of 470 specimens. This allowed performing genome wide correlation studies to find genetic variants (e.g. point mutations, small insertions and deletion, larger structural variants, plasmid copy number gains, gene dosage effects) in the genome and plasmids that are significantly correlated to the resistance against one or several drugs. The approach also allows for comparing the relevant sites in the genome to each other.

[0324] In the approach the different sources of genetic resistance as well as the different ways of how bacteria can become resistant were covered. By measuring clinical isolates collected in a broad geographical area and across a broad time span of three decades a complete picture going far beyond the rather artificial step of laboratory generated resistance mechanisms was tried to be generated.

[0325] To this end, a set of 21 clinically relevant antimicrobial agents with 5 different modes of action was put together, and the minimally inhibitory concentration (MIC) of the 21 drugs for the Shigella isolates was measured.

[0326] The detailed procedure is given in the following:

[0327] Bacterial Strains

[0328] The inventors selected 470 Shigella strains from the microbiology strain collection at Siemens Healthcare Diagnostics (West Sacramento, Calif.) for susceptibility testing and whole genome sequencing.

[0329] Antimicrobial Susceptibility Testing (AST) Panels Frozen reference AST panels were prepared following Clinical Laboratory Standards Institute (CLSI) recommendations. The following antimicrobial agents (with μg/ml concentrations shown in parentheses) were included in the panels: Amoxicillin/K Clavulanate (0.5/0.25-64/32), Ampicillin (0.25-128), Ampicillin/Sulbactam (0.5/0.25-64/32), Aztreonam (0.25-64), Cefazolin (0.5-32), Cefepime (0.25-64), Cefotaxime (0.25-128), Ceftazidime (0.25-64), Ceftriaxone (0.25-128), Cefuroxime (1-64), Cephalothin (1-64), Ciprofloxacin (0.015-8), Ertepenem (0.12-32), Gentamicin (0.12-32), Imipenem (0.25-32), Levofloxacin (0.25-16), Meropenem (0.12-32), Piperacillin/Tazobactam (0.25/4-256/4), Tetracycline (0.5-64), Tobramycin (0.12-32), and Trimethoprim/Sulfamethoxazole (0.25/4.7-32/608). Prior to use with clinical isolates, AST panels were tested with QC strains. AST panels were considered acceptable for testing with clinical isolates when the QC results met QC ranges described by CLSI16.

[0330] Inoculum Preparation

[0331] Isolates were cultured on trypticase soy agar with 5% sheep blood (BBL, Cockeysville, Md.) and incubated in ambient air at 35±1° C. for 18-24 h. Isolated colonies (4-5 large colonies or 5-10 small colonies) were transferred to a 3 ml Sterile Inoculum Water (Siemens) and emulsified to a final turbidity of a 0.5 McFarland standard. 2 ml of this suspension was added to 25 ml Inoculum Water with Pluronic-F (Siemens). Using the Inoculator (Siemens) specific for frozen AST panels, 5 μl of the cell suspension was transferred to each well of the AST panel. The inoculated AST panels were incubated in ambient air at 35±1° C. for 16-20 h. Panel results were read visually, and minimal inhibitory concentrations (MIC) were determined.

[0332] DNA Extraction

[0333] Four streaks of each Gram-negative bacterial isolate cultured on trypticase soy agar containing 5% sheep blood and cell suspensions were made in sterile 1.5 ml collection tubes containing 50 μl Nuclease-Free Water (AM9930, Life Technologies). Bacterial isolate samples were stored at −20° C. until nucleic acid extraction. The Tissue Preparation System (TPS) (096D0382-02_01_B, Siemens) and the VERSANT® Tissue Preparation Reagents (TPR) kit (10632404B, Siemens) were used to extract DNA from these bacterial isolates. Prior to extraction, the bacterial isolates were thawed at room temperature and were pelleted at 2000 G for 5 seconds. The DNA extraction protocol DNAext was used for complete total nucleic acid extraction of 48 isolate samples and eluates, 50 μl each, in 4 hours. The total nucleic acid eluates were then transferred into 96-Well qPCR Detection Plates (401341, Agilent Technologies) for RNase A digestion, DNA quantitation, and plate DNA concentration standardization processes. RNase A (AM2271, Life Technologies) which was diluted in nuclease-free water following manufacturer's instructions was added to 50 μl of the total nucleic acid eluate for a final working concentration of 20 μg/ml. Digestion enzyme and eluate mixture were incubated at 37° C. for 30 minutes using Siemens VERSANT® Amplification and Detection instrument. DNA from the RNase digested eluate was quantitated using the Quant-iT™ PicoGreen dsDNA Assay (P11496, Life Technologies) following the assay kit instruction, and fluorescence was determined on the Siemens VERSANT® Amplification and Detection instrument. Data analysis was performed using Microsoft® Excel 2007. 25 μl of the quantitated DNA eluates were transferred into a new 96-Well PCR plate for plate DNA concentration standardization prior to library preparation. Elution buffer from the TPR kit was used to adjust DNA concentration. The standardized DNA eluate plate was then stored at −80° C. until library preparation.

[0334] Next Generation Sequencing

[0335] Prior to library preparation, quality control of isolated bacterial DNA was conducted using a Qubit 2.0 Fluorometer (Qubit dsDNA BR Assay Kit, Life Technologies) and an Agilent 2200 TapeStation (Genomic DNA ScreenTape, Agilent Technologies). NGS libraries were prepared in 96 well format using NexteraXT DNA Sample Preparation Kit and NexteraXT Index Kit for 96 Indexes (Illumina) according to the manufacturer's protocol. The resulting sequencing libraries were quantified in a qPCR-based approach using the KAPA SYBR FAST qPCR MasterMix Kit (Peqlab) on a ViiA 7 real time PCR system (Life Technologies). 96 samples were pooled per lane for paired-end sequencing (2×100 bp) on Illumina Hiseq2000 or Hiseq2500 sequencers using TruSeq PE Cluster v3 and TruSeq SBS v3 sequencing chemistry (Illumina). Basic sequencing quality parameters were determined using the FastQC quality control tool for high throughput sequence data (Babraham Bioinformatics Institute).

[0336] Data Analysis

[0337] Raw paired-end sequencing data for the 470 Shigella samples were mapped against the Shigella reference (NC_016822) with BWA 0.6.1.20. The resulting SAM files were sorted, converted to BAM files, and PCR duplicates were marked using the Picard tools package 1.104 (http://picard.sourceforge.net/). The Genome Analysis Toolkit 3.1.1 (GATK) 21 was used to call SNPs and indels for blocks of 200 Shigella samples (parameters: -ploidy 1 -glm BOTH -stand_call_conf 30 -stand_emit_conf 10). VCF files were combined into a single file and quality filtering for SNPs was carried out (QD<2.0∥FS>60.0∥MQ<40.0) and indels (QD<2.0∥FS>200.0). Detected variants were annotated with SnpEff22 to predict coding effects. For each annotated position, genotypes of all Shigella samples were considered. Shigella samples were split into two groups, low resistance group (having lower MIC concentration for the considered drug), and high resistance group (having higher MIC concentrations) with respect to a certain MIC concentration (breakpoint). To find the best breakpoint all thresholds were evaluated and p-values were computed with Fisher's exact test relying on a 2×2 contingency table (number of Shigella samples having the reference or variant genotype vs. number of samples belonging to the low and high resistance group). The best computed breakpoint was the threshold yielding the lowest p-value for a certain genomic position and drug. For further analyses positions with non-synonymous alterations and p-value <10⁻⁹ were considered.

[0338] Since a potential reason for drug resistance is gene duplication, gene dose dependency was evaluated. For each sample the genomic coverage for each position was determined using BED Tools. 23 Gene ranges were extracted from the reference assembly NC_016822.gff and the normalized median coverage per gene was calculated. To compare low- and high-resistance isolates the best area under the curve (AUC) value was computed. Groups of at least 20% of all samples having a median coverage larger than zero for that gene and containing more than 15 samples per group were considered in order to exclude artifacts and cases with AUC >0.75 were further evaluated.

[0339] To include data on the different ways how resistance mechanisms are acquired Shigella isolates collected over more than three decades were analyzed such that also horizontal gene transfer could potentially be discovered.

[0340] In detail, the following steps were carried out: Shigella strains to be tested were seeded on agar plates and incubated under growth conditions for 24 hours. Then, colonies were picked and incubated in growth medium in the presence of a given antibiotic drug in dilution series under growth conditions for 16-20 hours. Bacterial growth was determined by observing turbidity.

[0341] Next mutations were searched that are highly correlated with the results of the phenotypic resistance test.

[0342] For sequencing, samples were prepared using a Nextera library preparation, followed by multiplexed sequencing using the Illuminat HiSeq 2500 system, paired end sequencing. Data were mapped with BWA (Li H. and Durbin R. (2010) Fast and accurate long-read alignment with Burrows-Wheeler Transform. Bioinformatics, Epub. [PMID: 20080505]) and SNP were called using samtools (Li H.*, Handsaker B.*, Wysoker A., Fennell T., Ruan J., Homer N., Marth G., Abecasis G., Durbin R. and 1000 Genome Project Data Processing Subgroup (2009) The Sequence alignment/map (SAM) format and SAMtools. Bioinformatics, 25, 2078-9. [PMID: 19505943]).

[0343] As reference genome, NC_016822 as annotated at the NCBI was determined as best suited.

[0344] The mutations were matched to the genes and the amino acid changes were calculated. Using different algorithms (SVM, homology modeling) mutations leading to amino acid changes with likely pathogenicity/resistance were calculated.

[0345] In total, whole genomes and plasmids of 470 different clinical isolates of Shigella species, particularly Shigella boydii, Shigella dysenteriae, Shigella flexneri, Shigella sonnei and other Shigella species, were sequenced, and classical antimicrobial susceptibility testing (AST) against 21 therapy forms as described above was performed for all organisms. From the classical AST a table with 470 rows (isolates) and 21 columns (MIC values for 21 drugs) was obtained. Each table entry contained the MIC for the respective isolate and the respective drug. The genetic data were mapped to different reference genomes of Shigella that have been annotated at the NCBI (http://www.ncbi.nlm.nih.gov/), and the best reference was chosen as template for the alignment—NC_016822 as annotated at the NCBI, found as SEQ ID NO 1 in the sequence listing. Additionally, assemblies were carried out and it was verified that the sequenced genomes fulfill all quality criteria to become reference genomes.

[0346] Next, genetic variants were evaluated. This approach resulted in a table with the genetic sites in columns and the same isolates in 470 rows. Each table entry contained the genetic determinant at the respective site (A, C, T, G, small insertions and deletions, . . . ) for the respective isolate.

[0347] In a next step different statistical tests were carried out
[0348] 1) For comparing resistance/susceptibility to genetic sites we calculated contingency tables and determined the significance using Fishers test
[0349] 2) For comparing different sites to each other we calculated the correlation between different genetic sites
[0350] 3) For detecting gene dosage effects, e.g. loss or gain of genes (in the genome or on plasmids) we calculated the coverage (i.e. how many read map to the current position) at each site for resistant and not resistant isolates.

[0351] From the data, first the 50 genes with the best p-value were chosen for the list of mutations as well as the list of correlated antibiotic resistance, representing Tables 1 and 2. As can be seen from Tables 1 and 2, slight differences between the tables can be observed, showing the necessity to carry out both steps for determining statistical significant data for antimicrobial drug, e.g. antibiotic, resistance profiles.

[0352] A full list of all genetic sites, drugs, drug classes, affected genes etc. is provided in Tables 3 and 4a, 4b and 4c, wherein Table 3 corresponds to Table 1 and represents the genes having the lowest p-values after determining mutations in the genes, and Table 4, respectively Tables 4a, 4b and 4c correspond to Table 2 and represent the genes having the lowest p-values after correlating the mutations with antibiotic resistance for the respective antibiotics.

TABLE 3
Detailed results for the genes in Example 1 (corresponding to Table 1)

| | | | | | genbank protein |
|---|---|---|---|---|---|
| POS | drug class | #drug classes | p-value | gene name | accession number |
| 2241215 | Lactams | 1 | 7.985E−51 | SSON53_12105 | YP_005456953.1 |
| 2309519 | Lactams | 1 | 2.5048E−49 | SSON53_12455 | YP_005457021.1 |
| 2233949 | Lactams | 1 | 8.7825E−49 | SSON53_12070 | YP_005456946.1 |
| 2314492 | Lactams | 1 | 1.9851E−48 | SSON53_12475 | YP_005457025.1 |
| 4595667 | polyketide | 2 | 2.2331E−47 | metH | YP_005459323.1 |
| | (tetracycline); Lactams | | | | |
| 87512 | Lactams | 1 | 6.3481E−47 | SSON53_00425 | YP_005454674.1 |
| 4502174 | Lactams | 1 | 6.6005E−47 | SSON53_23830 | YP_005459252.1 |
| 2543074 | Lactams | 1 | 1.1364E−46 | SSON53_13575 | YP_005457242.1 |
| 1159191 | Lactams | 1 | 1.4615E−46 | flgE | YP_005455738.1 |
| 2325584 | Lactams | 1 | 1.3919E−46 | SSON53_12500 | YP_005457030.1 |
| 1303652 | Lactams | 1 | 2.061E−46 | SSON53_06660 | YP_005455888.1 |
| 4707429 | polyketide | 2 | 2.4042E−46 | SSON53_24790 | YP_005459432.1 |
| | (tetracycline); Lactams | | | | |
| 3134050 | Lactams | 1 | 2.9472E−46 | SSON53_16770 | YP_005457860.1 |
| 4648709 | Lactams | 1 | 3.2112E−46 | SSON53_24480 | YP_005459374.1 |
| 1655745 | polyketide | 2 | 4.5874E−46 | SSON53_08770 | YP_005456302.1 |
| | (tetracycline); Lactams | | | | |
| 949314 | Lactams | 1 | 5.682E−46 | SSON53_04795 | YP_005455533.1 |
| 1427818 | Lactams | 1 | 6.4885E−46 | SSON53_07430 | YP_005456040.1 |
| 2636621 | Lactams | 1 | 6.8061E−46 | SSON53_14085 | YP_005457334.1 |
| 1429397 | Lactams | 1 | 7.2975E−46 | SSON53_07440 | YP_005456042.1 |
| 1690889 | Lactams | 1 | 8.2598E−46 | SSON53_08950 | YP_005456338.1 |
| 4856482 | Lactams | 1 | 8.0552E−46 | SSON53_25555 | YP_005459583.1 |
| 1723070 | Lactams | 1 | 1.0803E−45 | SSON53_09145 | YP_005456375.1 |
| 4857482 | Lactams | 1 | 9.8832E−46 | SSON53_25565 | YP_005459585.1 |
| 4705326 | polyketide | 2 | 1.5221E−45 | SSON53_24780 | YP_005459430.1 |
| | (tetracycline); Lactams | | | | |
| 862961 | Lactams | 1 | 2.1553E−45 | SSON53_04400 | YP_005455454.1 |
| 2876708 | polyketide | 2 | 2.2052E−45 | SSON53_15280 | YP_005457566.1 |
| | (tetracycline); Lactams | | | | |
| 887353 | Lactams | 1 | 2.3982E−45 | rimO | YP_005455475.1 |
| 980321 | Lactams | 1 | 2.4252E−45 | SSON53_04930 | YP_005455560.1 |
| 4429947 | Lactams | 1 | 2.6598E−45 | SSON53_23390 | YP_005459166.1 |
| 4431976 | Lactams | 1 | 2.6598E−45 | rhaB | YP_005459168.1 |
| 3376607 | Lactams | 1 | 2.8513E−45 | SSON53_17960 | YP_005458096.1 |
| 4565385 | Lactams | 1 | 2.9399E−45 | thiH | YP_005459296.1 |
| 750613 | Lactams | 1 | 3.6928E−45 | SSON53_03725 | YP_005455321.1 |
| 1781189 | Lactams | 1 | 3.71E−45 | SSON53_09500 | YP_005456446.1 |
| 4821412 | Lactams | 1 | 3.7289E−45 | SSON53_25405 | YP_005459553.1 |
| 2533864 | Lactams | 1 | 4.2097E−45 | SSON53_13530 | YP_005457233.1 |
| 1511130 | Lactams | 1 | 8.5623E−45 | astD | YP_005456138.1 |
| 1513422 | Lactams | 1 | 8.5623E−45 | SSON53_07945 | YP_005456141.1 |
| 1901825 | Lactams | 1 | 8.1722E−45 | SSON53_10080 | YP_005456556.1 |
| 1990704 | polyketide | 2 | 8.344E−45 | SSON53_10655 | YP_005456671.1 |
| | (tetracycline); Lactams | | | | |
| 2506615 | Lactams | 1 | 7.2324E−45 | SSON53_13400 | YP_005457207.1 |
| 2539010 | polyketide | 2 | 7.7328E−45 | SSON53_13555 | YP_005457238.1 |
| | (tetracycline); Lactams | | | | |
| 2803779 | Lactams | 1 | 7.875E−45 | SSON53_14945 | YP_005457501.1 |
| 2877526 | Lactams | 1 | 7.2573E−45 | SSON53_15285 | YP_005457567.1 |
| 3239464 | Lactams | 1 | 8.2293E−45 | fucI | YP_005457971.1 |
| 545532 | Lactams | 1 | 9.0371E−45 | SSON53_02755 | YP_005455128.1 |
| 1257335 | polyketide | 2 | 8.9271E−45 | SSON53_06415 | YP_005455839.1 |
| | (tetracycline); Lactams | | | | |
| 906989 | Lactams | 1 | 9.9901E−45 | SSON53_04615 | YP_005455497.1 |
| 3237959 | Lactams | 1 | 1.0949E−44 | SSON53_17330 | YP_005457970.1 |
| 60014 | Lactams | 1 | 1.307E−44 | pdxA | YP_005454652.1 |

TABLE 4a
Detailed results for the genes in Example 1 (corresponding to Table 2)

| | | | | #drug |
|---|---|---|---|---|
| POS | drug | #drugs | drug class | classes |
| 2241215 | CF; A/S; CRM; P/T; AM | 5 | Lactams | 1 |
| 2309519 | CF; A/S; CRM; P/T; AM; AUG | 6 | Lactams | 1 |
| 2314492 | CF; A/S; CRM; AM; AUG | 5 | Lactams | 1 |
| 4595667 | CF; TE; A/S; CRM; P/T; AM; AUG | 7 | Polyketide*; Lactams | 2 |
| 87512 | CF; A/S; CRM; AM; AUG | 5 | Lactams | 1 |
| 4502174 | CF; A/S; CRM; P/T; AM | 5 | Lactams | 1 |
| 2543074 | CF; A/S; CRM; P/T; AM | 5 | Lactams | 1 |
| 1159191 | CF; A/S; CRM; P/T; AM; AUG | 6 | Lactams | 1 |
| 2325584 | CF; A/S; CRM; P/T; AM; AUG | 6 | Lactams | 1 |
| 4707429 | CF; TE; A/S; CRM; P/T; AM; AUG | 7 | Polyketide*; Lactams | 2 |
| 3134050 | CF; CFZ; CRM; P/T; AM; A/S; AUG | 7 | Lactams | 1 |
| 1655745 | CF; TE; A/S; CRM; P/T; AM | 6 | Polyketide*; Lactams | 2 |
| 949314 | CF; A/S; CRM; P/T; AM | 5 | Lactams | 1 |
| 1427818 | CF; A/S; CRM; P/T; AM; AUG | 6 | Lactams | 1 |
| 2636621 | CF; A/S; CRM; AM; AUG | 5 | Lactams | 1 |
| 1429397 | CF; A/S; CRM; P/T; AM; AUG | 6 | Lactams | 1 |
| 1690889 | CF; A/S; CRM; P/T; AM | 5 | Lactams | 1 |
| 4856482 | CF; A/S; CRM; P/T; AM | 5 | Lactams | 1 |
| 1723070 | CF; A/S; CRM; P/T; AM | 5 | Lactams | 1 |
| 4857482 | CF; A/S; CRM; P/T; AM | 5 | Lactams | 1 |
| 4705326 | CF; TE; A/S; CRM; P/T; AM | 6 | Polyketide*; Lactams | 2 |
| 862961 | CF; A/S; CRM; P/T; AM | 5 | Lactams | 1 |
| 2876708 | CF; TE; A/S; CRM; P/T; AM | 6 | Polyketide*; Lactams | 2 |
| 980321 | CF; A/S; CRM; P/T; AM | 5 | Lactams | 1 |
| 4429947 | CF; A/S; CRM; P/T; AM | 5 | Lactams | 1 |
| 4431976 | CF; A/S; CRM; P/T; AM | 5 | Lactams | 1 |
| 3376607 | CF; A/S; CRM; P/T; AM | 5 | Lactams | 1 |
| 4565385 | CF; A/S; CRM; P/T; AM | 5 | Lactams | 1 |
| 750613 | CF; A/S; CRM; P/T; AM | 5 | Lactams | 1 |
| 1781189 | CF; A/S; CRM; P/T; AM | 5 | Lactams | 1 |
| 4821412 | CF; A/S; CRM; P/T; AM | 5 | Lactams | 1 |
| 2533864 | CF; A/S; CRM; P/T; AM | 5 | Lactams | 1 |
| 1511130 | CF; A/S; CRM; P/T; AM | 5 | Lactams | 1 |
| 1513422 | CF; A/S; CRM; P/T; AM | 5 | Lactams | 1 |
| 1901825 | CF; A/S; CRM; P/T; AM | 5 | Lactams | 1 |
| 1990704 | CF; TE; A/S; CRM; P/T; AM | 6 | Polyketide*; Lactams | 2 |
| 2506615 | CF; A/S; CRM; P/T; AM | 5 | Lactams | 1 |
| 2539010 | CF; TE; A/S; CRM; P/T; AM | 6 | polyketide*; Lactams | 2 |
| 2803779 | CF; A/S; CRM; P/T; AM | 5 | Lactams | 1 |
| 2877526 | CF; A/S; CRM; P/T; AM; AUG | 6 | Lactams | 1 |
| 3239464 | CF; A/S; CRM; P/T; AM | 5 | Lactams | 1 |
| 545532 | CF; A/S; CRM; P/T; AM | 5 | Lactams | 1 |
| 1257335 | CF; TE; A/S; CRM; P/T; AM | 6 | polyketide*; Lactams | 2 |
| 906989 | CF; A/S; CRM; P/T; AM | 5 | Lactams | 1 |
| 3237959 | CF; A/S; CRM; P/T; AM | 5 | Lactams | 1 |
| 60014 | CF; A/S; CRM; P/T; AM | 5 | Lactams | 1 |
| 921872 | CF; A/S; CRM; P/T; AM | 5 | Lactams | 1 |
| 983367 | CF; A/S; CRM; P/T; AM | 5 | Lactams | 1 |
| 1182426 | CF; A/S; CRM; P/T; AM | 5 | Lactams | 1 |
| 1200860 | CF; A/S; CRM; P/T; AM; AUG | 6 | Lactams | 1 |

*(tetracycline)

TABLE 4b
Detailed results for the genes in Example 1 (corresponding to Table 2, continued)

| | | | | | | #significant |
|---|---|---|---|---|---|---|
| | | | | | #significant | other (benzene |
| | best | #significant | #significant | #significant | polyketide | derived)/ |
| POS | drug | Lactams | fluoroquinolones | aminoglycosides | (tetracycline) | sulfonamide |
| 2241215 | CRM | 5 | 0 | 0 | 0 | 0 |
| 2309519 | CF | 6 | 0 | 0 | 0 | 0 |
| 2314492 | CF | 5 | 0 | 0 | 0 | 0 |
| 4595667 | CRM | 6 | 0 | 0 | 1 | 0 |
| 87512 | CF | 5 | 0 | 0 | 0 | 0 |
| 4502174 | CRM | 5 | 0 | 0 | 0 | 0 |
| 2543074 | CRM | 5 | 0 | 0 | 0 | 0 |
| 1159191 | CRM | 6 | 0 | 0 | 0 | 0 |
| 2325584 | CF | 6 | 0 | 0 | 0 | 0 |
| 4707429 | CRM | 6 | 0 | 0 | 1 | 0 |
| 3134050 | CRM | 7 | 0 | 0 | 0 | 0 |
| 1655745 | CRM | 5 | 0 | 0 | 1 | 0 |
| 949314 | CRM | 5 | 0 | 0 | 0 | 0 |
| 1427818 | CRM | 6 | 0 | 0 | 0 | 0 |
| 2636621 | CF | 5 | 0 | 0 | 0 | 0 |
| 1429397 | CRM | 6 | 0 | 0 | 0 | 0 |
| 1690889 | CRM | 5 | 0 | 0 | 0 | 0 |
| 4856482 | CRM | 5 | 0 | 0 | 0 | 0 |
| 1723070 | CRM | 5 | 0 | 0 | 0 | 0 |
| 4857482 | CRM | 5 | 0 | 0 | 0 | 0 |
| 4705326 | CRM | 5 | 0 | 0 | 1 | 0 |
| 862961 | CRM | 5 | 0 | 0 | 0 | 0 |
| 2876708 | CRM | 5 | 0 | 0 | 1 | 0 |
| 980321 | CRM | 5 | 0 | 0 | 0 | 0 |
| 4429947 | CRM | 5 | 0 | 0 | 0 | 0 |
| 4431976 | CRM | 5 | 0 | 0 | 0 | 0 |
| 3376607 | CRM | 5 | 0 | 0 | 0 | 0 |
| 4565385 | CRM | 5 | 0 | 0 | 0 | 0 |
| 750613 | CRM | 5 | 0 | 0 | 0 | 0 |
| 1781189 | CRM | 5 | 0 | 0 | 0 | 0 |
| 4821412 | CRM | 5 | 0 | 0 | 0 | 0 |
| 2533864 | CRM | 5 | 0 | 0 | 0 | 0 |
| 1511130 | CRM | 5 | 0 | 0 | 0 | 0 |
| 1513422 | CRM | 5 | 0 | 0 | 0 | 0 |
| 1901825 | CRM | 5 | 0 | 0 | 0 | 0 |
| 1990704 | CRM | 5 | 0 | 0 | 1 | 0 |
| 2506615 | CRM | 5 | 0 | 0 | 0 | 0 |
| 2539010 | CRM | 5 | 0 | 0 | 1 | 0 |
| 2803779 | CRM | 5 | 0 | 0 | 0 | 0 |
| 2877526 | CRM | 6 | 0 | 0 | 0 | 0 |
| 3239464 | CRM | 5 | 0 | 0 | 0 | 0 |
| 545532 | CRM | 5 | 0 | 0 | 0 | 0 |
| 1257335 | CRM | 5 | 0 | 0 | 1 | 0 |
| 906989 | CRM | 5 | 0 | 0 | 0 | 0 |
| 3237959 | CRM | 5 | 0 | 0 | 0 | 0 |
| 60014 | CRM | 5 | 0 | 0 | 0 | 0 |
| 921872 | CRM | 5 | 0 | 0 | 0 | 0 |
| 983367 | CRM | 5 | 0 | 0 | 0 | 0 |
| 1182426 | CRM | 5 | 0 | 0 | 0 | 0 |
| 1200860 | CF | 6 | 0 | 0 | 0 | 0 |

TABLE 4c
Detailed results for the genes in Example 1
(corresponding to Table 2, continued)

| | | | genbank protein |
|---|---|---|---|
| POS | p-value | gene name | accession number |
| 2241215 | 2.29978E−44 | SSON53_12105 | YP_005456953.1 |
| 2309519 | 3.60701E−43 | SSON53_12455 | YP_005457021.1 |
| 2314492 | 1.4137E−42 | SSON53_12475 | YP_005457025.1 |
| 4595667 | 9.18813E−42 | metH | YP_005459323.1 |
| 87512 | 1.90101E−41 | SSON53_00425 | YP_005454674.1 |
| 4502174 | 1.90101E−41 | SSON53_23830 | YP_005459252.1 |
| 2543074 | 2.97533E−41 | SSON53_13575 | YP_005457242.1 |
| 1159191 | 3.23782E−41 | flgE | YP_005455738.1 |
| 2325584 | 3.23782E−41 | SSON53_12500 | YP_005457030.1 |
| 4707429 | 4.32775E−41 | SSON53_24790 | YP_005459432.1 |
| 3134050 | 4.99312E−41 | SSON53_16770 | YP_005457860.1 |
| 1655745 | 6.60616E−41 | SSON53_08770 | YP_005456302.1 |
| 949314 | 7.79281E−41 | SSON53_04795 | YP_005455533.1 |
| 1427818 | 8.12502E−41 | SSON53_07430 | YP_005456040.1 |
| 2636621 | 8.16766E−41 | SSON53_14085 | YP_005457334.1 |
| 1429397 | 8.40704E−41 | SSON53_07440 | YP_005456042.1 |
| 1690889 | 8.49615E−41 | SSON53_08950 | YP_005456338.1 |
| 4856482 | 8.49615E−41 | SSON53_25555 | YP_005459583.1 |
| 1723070 | 9.15152E−41 | SSON53_09145 | YP_005456375.1 |
| 4857482 | 9.15152E−41 | SSON53_25565 | YP_005459585.1 |
| 4705326 | 1.25253E−40 | SSON53_24780 | YP_005459430.1 |
| 862961 | 1.71651E−40 | SSON53_04400 | YP_005455454.1 |
| 2876708 | 1.71651E−40 | SSON53_15280 | YP_005457566.1 |
| 980321 | 1.791E−40 | SSON53_04930 | YP_005455560.1 |
| 4429947 | 1.82392E−40 | SSON53_23390 | YP_005459166.1 |
| 4431976 | 1.82392E−40 | rhaB | YP_005459168.1 |
| 3376607 | 1.90979E−40 | SSON53_17960 | YP_005458096.1 |
| 4565385 | 1.91751E−40 | thiH | YP_005459296.1 |
| 750613 | 2.19179E−40 | SSON53_03725 | YP_005455321.1 |
| 1781189 | 2.19179E−40 | SSON53_09500 | YP_005456446.1 |
| 4821412 | 2.19179E−40 | SSON53_25405 | YP_005459553.1 |
| 2533864 | 2.37735E−40 | SSON53_13530 | YP_005457233.1 |
| 1511130 | 3.73641E−40 | astD | YP_005456138.1 |
| 1513422 | 3.73641E−40 | SSON53_07945 | YP_005456141.1 |
| 1901825 | 3.73641E−40 | SSON53_10080 | YP_005456556.1 |
| 1990704 | 3.73641E−40 | SSON53_10655 | YP_005456671.1 |
| 2506615 | 3.73641E−40 | SSON53_13400 | YP_005457207.1 |
| 2539010 | 3.73641E−40 | SSON53_13555 | YP_005457238.1 |
| 2803779 | 3.73641E−40 | SSON53_14945 | YP_005457501.1 |
| 2877526 | 3.73641E−40 | SSON53_15285 | YP_005457567.1 |
| 3239464 | 3.73641E−40 | fucI | YP_005457971.1 |
| 545532 | 3.82761E−40 | SSON53_02755 | YP_005455128.1 |
| 1257335 | 3.82761E−40 | SSON53_06415 | YP_005455839.1 |
| 906989 | 4.16996E−40 | SSON53_04615 | YP_005455497.1 |
| 3237959 | 4.20456E−40 | SSON53_17330 | YP_005457970.1 |
| 60014 | 4.28671E−40 | pdxA | YP_005454652.1 |
| 921872 | 4.28671E−40 | SSON53_04690 | YP_005455512.1 |
| 983367 | 4.28671E−40 | SSON53_04945 | YP_005455563.1 |
| 1182426 | 4.28671E−40 | SSON53_06005 | YP_005455761.1 |
| 1200860 | 4.28671E−40 | SSON53_06085 | YP_005455777.1 |

[0353] In addition, the data with the best p-values for each antibiotic class with the most antibiotic drugs as well as each antibiotic, respectively, were evaluated, being disclosed in Tables 5-12.

[0354] In Tables 3-12 the columns are designated as follows:

[0355] Gene name: affected gene;

[0356] POS: genomic position of the SNP/variant in the Shigella reference genome (see above);

[0357] P-value: significance value calculated using Fishers exact test;

[0358] genbank protein accession number: (NCBI) Accession number of the corresponding protein of the genes

[0359] Also the antibiotic/drug classes, the number of significant antibiotics correlated to the mutations (over all antibiotics or over certain classes), as well as the correlated antibiotics are denoted in the Tables.

[0360] The p-value was calculated using the Fisher exact test based on contingency table with 4 fields: #samples Resistant/wild type; #samples Resistant/mutant; #samples not Resistant/wild type; #samples not Resistant/mutant

[0361] The test is based on the distribution of the samples in the 4 fields. Even distribution indicates no significance, while clustering into two fields indicates significance.

[0362] The following results were obtained
[0363] A total of 49,560 different correlations between genetic sites and anti-microbial agents were detected (p-value <10⁻⁶).
[0364] These refer to 35,686 unique genetic positions such that each position was significant in 1.388 drugs on average
[0365] The biggest part of these were point mutations (i.e. single base exchanges)
[0366] The highest significance (10⁻⁵⁰) was reached for a frameshift mutation in YP_005456953.1
[0367] Besides these, insertions or deletions of up to four bases were discovered
[0368] Further, potential genetic tests for five different drug classes relating to resistances were discovered
   [0369] β-lactams (includes Penicillins, Cephalosporins, Carbapenems, Monobactams)
   [0370] Quinolones, particularly Fluoroquinolones
   [0371] Aminoglycosides
   [0372] Polyketides, particularly Tetracyclines
   [0373] Folate synthesis inhibitors
[0374] Potential genetic tests for all tested drugs/drug combinations were discovered:

[0375] Amoxicillin/Clavulanate, Ampicillin, Ampicillin/Sulbactam, Aztreonam, Cefazolin, Cefepime, Ceftazidime, Cefuroxime, Cephalothin, Imipenem, Piperacillin/Tazobactam, Ciprofloxacin, Levofloxacin, Gentamycin, Tobramycin, Tetracycline, Trimethoprim/Sulfamethoxazol
[0376] Mutations were observed in 4,159 different genes

[0377] While in the tables only the best mutations in each gene are represented, a manifold of different SNPs has been found for each gene. Examples for multiple SNPs for two of the genes given in Table 3 are shown in the following Tables 15 and 16.

TABLE 15
Statistically significant SNPs in gene SSON53_04930
(genbank protein accession number YP_005455560.1) (headers as
in Tables 3 and 4. respectively)

| | | | drug | best | |
|---|---|---|---|---|---|
| POS | drug | #drugs | class | drug | p-value |
| 980321 | CF; A/S; CRM; P/T; | 5 | Lactams | CRM | 2.4252E−45 |
| | AM | | | | |
| 980020 | CF; A/S; CRM; P/T; | 5 | Lactams | CRM | 3.7635E−43 |
| | AM | | | | |
| 980125 | CF | 1 | Lactams | CF | 7.6740E−13 |
| 981117 | CF | 1 | Lactams | CF | 1.2433E−11 |
| 981292 | CF | 1 | Lactams | CF | 2.9549E−14 |
| 980512 | CRM | 1 | Lactams | CRM | 8.9468E−12 |
| 980236 | CF; CFZ; CRM; | 4 | Lactams | CF | 2.3827E−23 |
| | AUG | | | | |
| 980513 | CRM | 1 | Lactams | CRM | 8.9468E−12 |
| 980197 | CF; CRM | 2 | Lactams | CF | 2.8779E−17 |
| 980443 | CF; CRM | 2 | Lactams | CRM | 8.6655E−22 |
| 981180 | CF | 1 | Lactams | CF | 1.6151E−13 |
| 980645 | CF; A/S; CRM; P/T; | 5 | Lactams | CRM | 2.0770E−40 |
| | AM | | | | |
| 981061 | CF | 1 | Lactams | CF | 7.3232E−12 |
| 979958 | CF; A/S; CRM; P/T; | 5 | Lactams | CRM | 3.7635E−43 |
| | AM | | | | |

TABLE 16
Statistically significant SNPs in gene SSON53_12500
(genbank protein accession number YP_005457030.1)

| | | | | best | |
|---|---|---|---|---|---|
| POS | drug | #drugs | drug class | drug | p-value |
| 2325584 | CF; A/S; CRM; | 6 | Lactams | CF | 1.3919E−46 |
| | P/T; AM; AUG | | | | |
| 2325091 | CF; CRM | 2 | Lactams | CF | 7.9809E−23 |
| 2325450 | CF; CRM | 2 | Lactams | CF | 7.9809E−23 |
| 2326217 | CF; A/S; CRM; | 6 | Lactams | CF | 5.5093E−42 |
| | P/T; AM; AUG | | | | |

[0378] Similar results were obtained for other genes but are omitted for the sake of brevity.

[0379] Further, a synergistic effect of individual SNPs was demonstrated by exhaustively comparing significance levels for association of single SNPs with antibiotic susceptibility/resistance and significance levels for association of combinations of SNPs with antibiotic susceptibility/resistance. For a representative example of 2 SNPs

| POS | REFERENCE | ALTERATION |
|---|---|---|
| 2309519 | C | G |
| 2233949 | ATAT | A |

the significance level for synergistic association of two SNPs was at least 158% of the association of either SNP alone, corresponding to an increase of 58% to the original diagnostic information content. Again, similar results were obtained for other SNPs in respective genes.

[0380] Interestingly, it was also observed that the synergistic effect is enhanced for a combination of SNPs in different genes compared to SNPs from the same gene. Specifically, the above shown example reaching the increase to 158% of the original performance was obtained by combining two mutations from two different genes.

[0381] A genetic test for the combined pathogen identification and antimicrobial susceptibility testing direct from the patient sample can reduce the time-to actionable result significantly from several days to hours, thereby enabling targeted treatment. Furthermore, this approach will not be restricted to central labs, but point of care devices can be developed that allow for respective tests. Such technology along with the present methods and computer program products could revolutionize the care, e.g. in intense care units or for admissions to hospitals in general. Furthermore, even applications like real time outbreak monitoring can be achieved using the present methods.

[0382] Instead of using only single variants, a combination of several variant positions can improve the prediction accuracy and further reduce false positive findings that are influenced by other factors.

[0383] Compared to approaches using MALDI-TOF MS, the present approach has the advantage that it covers almost the complete genome and thus enables us to identify the potential genomic sites that might be related to resistance. While MALDI-TOF MS can also be used to identify point mutations in bacterial proteins, this technology only detects a subset of proteins and of these not all are equally well covered. In addition, the identification and differentiation of certain related strains is not always feasible.

[0384] The present method allows computing a best breakpoint for the separation of isolates into resistant and susceptible groups. The inventors designed a flexible software tool that allows to consider—besides the best breakpoints—also values defined by different guidelines (e.g. European and US guidelines), preparing for an application of the GAST in different countries.

[0385] The inventors demonstrate that the present approach is capable of identifying mutations in genes that are already known as drug targets, as well as detecting potential new target sites.

[0386] The current approach enables
[0387] a. Identification and validation of markers for genetic identification and susceptibility/resistance testing within one diagnostic test
[0388] b. validation of known drug targets and modes of action
[0389] c. detection of potentially novel resistance mechanisms leading to putative novel target/secondary target genes for new therapies

The application's sequence listing, which the Patent Office published only in electronic form, follows.

SEQUENCE LISTING (1 sequence)

SEQ ID NO: 1 - DNA, 4988504 bp, Shigella sonnei 53G (residues 1-1,662,835 of 4,988,504)
agcttttcattctgactgcaacgggcaatatgtctctgtgtggattaaaaaaagagtgtctgatagcagcttctgaactggttacctgccatgagtaaattaaaattttattgacttaggtcactaaatactttaaccaatataggcatagcgcacagacagataaaaattacagagtacacaacatccatgaaacgcattagcaccaccattaccaccaccatcaccattaccacaggtaacggtgcgggctgacgcgtacaggaaacacagaaaaaagcccgcacctgacagtgcgggctttttttttcgaccaaaggtaacgaggtaacaaccatgcgagtgttgaagttcggcggtacatcagtggcaaatgcagaacgttttctgcgggttgccgatattctggaaagcaatgccaggcaggggcaggtggccaccgtcctctctgcccccgccaaaatcaccaaccacctggtggcgatgattgaaaaaaccattagcggccaggatgctttacccaatatcagcgatgccgaacgtatttttgccgaacttttgacgggactcgccgccgcccagccgggattcccgctggcgcaattgaaaactttcgtcgaccaggaatttgcccaaataaaacatgtcctgcatggcattagtttgttagggcagtgcccggatagcattaacgctgcgctgatttgccgtggcgagaaaatgtcgatcgccattatggccggcgtgttagaagcgcgtggtcacaacgttaccgttatcgatccggtcgaaaaactactggcagtggggcattacctcgaatctaccgtcgatattgctgagtccacccgccgtattgcggcaagtcgtattccggctgatcacatggtgctgatggcaggcttcaccgccggtaatgaaaaaggcgaactggtggtacttggacgcaacggttccgactactccgcggcggtgctggctgcctgtttacgcgccgattgttgcgagatttggacggacgttgacggggtctatacctgcgacccgcgtcaggtgcccgatgcgaggttgttgaagtcgatgtcctaccaggaagcgatggagctttcctacttcggcgctaaagttcttcacccccgcaccattacccccatcgcccagttccagatcccttgcctgattaaaaataccggaaatcctcaagcaccaggtacgctcattggtgccagtcgtgatgaaggcgaattaccggtcaagggcatttccaatctgaataacatggcaatgttcagcgtttccggcccggggatgaaaggaatggtcggcatggcggcgcgcgtctttgccgcgatgtcacgcgcccgtatttccgtggtgctgattacgcaatcatcttccgaatacagtatcagtttctgcgttccgcaaagcgactgtgtgcgggctgaacgggcaatgcaggaagagttctacctggaactgaaagaaggcttactggagccgctggcggtgatggaacggctggccattatctcggtggtaggtgatggtatgcgcaccttgcgtgggatctcggcgaaattctttgccgcgctggcccgcgccaatatcaacattgtcgccattgctcagggatcttctgaacgctcaatctctgtcgtggtaaataacgatgatgcgaccactggcgtgcgcgttactcatcagatgctgttcaataccgatcaggttatcgaagtgtttgtgattggcgtcggtggcgttggcggtgcgctgctggagcaactgaagcgtcagcaaagctggctgaagaataaacatatcgacttacgtgtctgcggcgttgccaactcgaaggctctgctcactagtgtgcatggccttaatctggaaaactggcaggaagaacttgcacaagccaaagagccgtttaatctcgggcgcttaattcgcctcgtgaaagaatatcatctgctgaacccggtcattgttgactgcacctccagccaggcagtggcggatcaatatgccgacttcctgcgcgaaggtttccacgttgtcacgccgaacaaaaaggccaacacctcgtcgatggattactatcatcagttgcgttatgcggcggaaaaatcgcggcgtaaattcctctatgacaccaacgttggggctggattaccggttattgagaacctgcaaaatctgctcaatgcaggtgatgaattggtgaagttctccggcattctttcaggttcgctttcttatatcttcggcaagttagacgaaggcatgagtttctccgaggcgaccacgctggcgcgggaaatgggttataccgaaccggacccgcgagatgatctttctggtatggatgtggcgcgtaaactattgattctcgctcgtgaaacgggacgtgaactggagctggcggatattgaaattgaacctgtgctgcccgcagagtttaacgccgagggtgatgttgccgcttttatggcgaatctgtcacagctcgacgatctctttgccgcgcgcgtggcgaaggcccgtgatgaaggaaaagttttgcgctatgttggcaatattgatgaagatggtgtctgccgcgtgaagattgccgaagtggatgggaatgatccgctgttcaaagtgaaaaatggcgaaaacgccctggccttttatagccactattatcagccgctgccgttggtgctgcgcggatatggtgcgggcaatgacgttaccgctgctggtgtctttgccgatctgctacgtaccctctcatggaagttaggagtctgacatggttaaagtttatgccccggcttccagtgccaatatgagcgtcgggtttgatgtgctcggggcggcggtgacacccgttgatggtgcattgctcggagatgtagtcacggttgaggcggcagagacattcagtctcaacaacctcggacgctttgccgataagctgccgtcagaaccacgggaaaatatcgtttatcagtgctgggagcgtttttgcctggagctgggcaagcaaattccagtggcgatgactctggaaaagaatatgccgatcggctcgggcttaggctccagcgcctgttcggtggtcgcggcgctgatggcgatgaatgaacactgcggcaagccacttaatgacacccgtttgctggctttgatgggcgagctggaaggacgtatctccggcagcattcattacgacaacgtggcaccgtgttttcttggtggtatgcagttgatgatcgaagaaaacgacatcatcagccagcaagtgccagggtttgatgagtggctgtgggtgctggcgtatccgggaattaaagtctcgacggcagaagcccgggctattttaccggcgcagtatcgccgccaggattgcattgcgcacgggcgacatctggctggcttcattcacgcctgctattcccgtcagcctgagcttgccgcgaagctgatgaaagatgttatcgctgaaccctaccgtgaacggttactgcctggcttccggcaggcgcggcaggcggtcgcggaaatcggcgcggtagcgagcggtatctccggctccggcccgaccttgttcgctctatgtgacaagccggataccgcccagcgcgttgccgactggttgggtaagaactacctgcaaaatcaggaaggttttgttcatatttgccggctggatacggcgggcgcacgagtactggaaaactaaatgaaactctacaatctgaaagatcacaacgagcaggtcagctttgcgcaagccgtaacccaggggttgggcaaaaatcaggggctgttttttccgcatgacctgccggaattcagcctgactgaaattgatgagatgctgaagctggattttgtcacccgcagtgcgaagatcctctcggcgtttattggtgatgaaatcccgcaggaaatcctggaagagcgcgtgcgcgcggcgtttgccttcccggctccggtcgccaatgttgaaagcgatgtcggttgtctggaattgttccacgggccaacgctggcatttaaagatttcggcggtcgctttatggcacaaatgctgacccatattgcgggcgataagccagtgaccattctgaccgcgacctccggtgataccggagcggcagtggctcatgctttctacggtttgccgaatgtgaaagtggttatcctctatccacgaggcaaaatcagtccactgcaagaaaaactgttctgtacgttgggcggcaatatcgaaactgttgccatcgacggcgatttcgatgcctgtcaggcgctggtgaagcaggcgtttgatgatgaagaactgaaagtggcgctggggttaaactcggctaactcgattaacatcagccgtttgctggcgcagatttgctactactttgaagcagttgcgcagctgccgcaggaagcgcgcaaccagctggttgtctcggtgccaagcggaaacttcggcgatttgacggcgggtctgctggcgaagtcactcggtctgccggtgaaacgttttattgctgcgaccaacgtgaacgataccgtgccacgtttcctgcacgacggtcagtggtcacccaaagcgactcaggcgacgttatccaacgcgatggacgtgagtcagccgaacaactggccgcgtgtggaagagttgttccgccgcaaaatctggcaactgaaagagctgggttatgcagccgtggatgatgaaaccacgcaacagacaatgcgtgagttaaaagaactgggctacacctcggagccgcacgctgccgtagcgtatcgtgcgctgtgtgaccagttgaatccaggcgaatatggcttgttcctcggcaccgcgcatccggcgaaatttaaagagagcgtggaagcgattctcggtgaaacgttggatctgccaaaagagctggcagaacgtgctgatttacccttgctttcacataatctgcccgccgattttgctgcgttgcgtaaattgatgatgaatcatcagtaaaatctattcattatctcaatcaggccgggtttgcttttatgcagcccggcttttttatgaagaaattatggagaaaaacgacagggaaaaaggagaaattctcaataaatgcggtaacttagagattaggattgcggagaataacaaccgtcgttctcatcgcgtaatctccggatatcgacccataacgggcaatgataaaaggagtaacctgtgaaaaagatgcaatctatcgtactcgcactttccctggttctggtcgctcccatggcagcacaggctgcggaaattacgttagtcccgtcagtaaaattacagataggcgatcgtgataatcgtggctattactgggatggaggtcactggcgcgaccacggctggtggaaacaacattatgaatggcgaggcaatcgctggcacccacacggaccgccgccaccgccgcgccaccataagaaagctcctcatgatcatcacggcggtcatggtccaggcaaacatcaccgctaaatgacaaatgccgggtaacaatccggcattcagcgcctgatgcgacgctggcgcgtcttatcaggcctacgtgaattctgcaatatattgaatctgcatgcttttgtaggccggataaggcgttcacgccgcatccggcattgactgcaaacttaacgctgctcgtagcgtttaaacaccagttcgccattgctggaggaagcttcatcaaagaagtaaccttcgctattaaaaccagtcagttgctctggtttggtcagccgattttcaataatgaaacgactcatcagaccgcgtgctttcttagcgtagaagctgattatcttaaatttgccgttcttctcatcgaggaacaccggcttgataatctcggcattcaatttcttcggcttcaccgatttaaaatactcatctgacgccagattaatcaccacattatcgccttgtgctgcgagcgcctcgttcagcttgttggtgatgatatctccccagaattgatacagatctttccctcgggcattctcaagacggatccccatttccagacgataaggctgcattaaatcgagcgggcgcagtacgccatacaagccggaaagcattcgcaaatgctgttgggcaaaatcgaaatcgtcttcgctgaaagtttcggcctgcaagccggtgtagacatcacctttaaacgccaaaatagcctggcgggcattctccggcgtgaaatctggctgccagtcatgaaagcgagcggcgttgatacccgccagtttgtcgctgatgcgcatcagcgtgctaatctgcggaggcgtcagtttccgcgcttcatggatcaagtgctgggaattgtctaacagctccggcagcgtatagcgcgtggtggtcaacgggctttggtaatcaagcgttttcgcaggtgaaataagaatcagcatatccagtccttgcaggaaatttatgccgactttagcaaaaaaagagaatgagttgatcgatagttgtgattactcctgcgaaacatcatcccacgcgtccggagaaagctggcgaccgatatccggataacgcaacggatcaaacaccgggcgcacgccgagtttacgctggcgtagataatcactggcaatggtatgaaccacaggcgagagcagtaaaatggcggtcaaattggtaatagccatgcaggccattatgatatctgccagttgccacatcagcggaagacttagcaaggtgccgccgatgaccgttgcgaaggtgcagatccgcaaacaccagatcgctttagggttgttcaggcgtaaaaagaagagattgttttcggcataaatgtagttggcaacgatggagctgaaggcaaacagaataaccacgagggtaacaaactcagcaccccaggaacccattagcacccgcatcgccttctggataagctgaataccttccagcggcatgtaggttgtgtcgttacccgccagtaatatcagcatggcgcttgccgtacagatgaccagggtgtcgataaaaatgccaatcatctggacaatcccttgcgctgccggatgcggaggccaggacgccgctgccgctgccgcgtttggcgtcgaacccattcccgcctcattggaaaacatactgcgctgaaaaccgttagtaatcgcctggcttaaggtatatcccgccgcgccgcctgccgcttcctgccagccaaaagcactctcaaaaatagaccaaatgacgtggggaagttgcccgatatttattacgcaaatcaccatgctggtcagcacccagattatcgccatcaacgggacaaacccctgcatgagccgggcgacgccatgaagaccgcgagtgattgccagcagagcaaagacagcgagaataatgcctgtcaccagcgggggaaaatcaaaagaaaactcagggctcgggcaacggcgttcgcctgaactccgctgaaaattatgccgtaggcgatgagcaaaaagacggcgaacagaacgcccatccaacgcatccccagcccgcgcgccatataccatgccggtcctccacgaaactgtccattgacgtcacgttctttataaagttgtgcaagggaacattcggcaaacgaggtcgccatgccgataaacgcggcaacccacatccaaaagacggctccaggtccaccggcggtaatagccagcgcaacgccggccaggttgccgctacccacgcgcgccgcaagactggtacacaatgactgaaatgaggttaaaccgcctggctgtggatgaatgctatttttaagacttttgccaaactggcggatgtagcgaaactgcacaaatccggtgcgaaaagtgaaccaacaacctgcgccgaagagcaggtaaatcattaccgatccccaaaggacgctgttaataaaggagaaaaaatctggcatgcatatccctcttattgccggtcgcgatgactttcctgtgtaaacgttaccaattgtttaagaagtatatacgctacgaggtacttgataacttctgcgtagcatacatgaggttttgtataaaaatggcgggcgatatcaacgcagtgtcagaaatccgaaacagtctcgcctggcgataaccgtcttgtcggcggttgcgctgacgttgcgtcgtgatatcatcagggcagaccggttacatccccctaacaagctgtttaaagagaaatactatcatgacggacaaattgacctcccttcgtcagtacaccaccgtagtggccgacactggggacatcgcggcaatgaagctgtatcaaccgcaggatgccacaaccaacccttctctcattcttaacgcagcgcagattccggaataccgtaagttgattgatgatgctgtcgcctgggcgaaacagcagagcaacgatcgcgcgcagcagatcgtggacgcgaccgacaaactggcagtaaatattggtctggaaatcctgaaactggttccgggccgtatctcaactgaagttgatgcgcgtctttcctatgacaccgaagcgtcaattgcgaaagcaaaacgcctgatcaaactctacaacgatgctggtattagcaacgatcgtattctgatcaaactggcttctacctggcagggtatccgtgctgcagaacagctggaaaaagaaggcatcaactgtaacctgaccctgctgttctccttcgctcaggctcgtgcttgtgcggaagcaggcgtgttcctgatctcgccatttgttggccgtattcttgactggtacaaagcgaatactgataagaaagagtacgctccggcagaagatccgggcgtggtttctgtatctgaaatctaccagtactacaaagagcacggttatgaaaccgtggttatgggcgcaagcttccgtaacatcggcgaaattctggaactggcaggctgcgaccgtcttaccatcgcaccggcactgctgaaagagctggctgagagcgaaggggctatcgaacgtaaactgtcttacaccggcgaagtgaaagcgcgtccggcgcgtatcactgagtccgagttcctgtggcagcacaaccaggatccaatggcagtagataaactggcggaaggtatccgtaagtttgctattgaccaggaaaaactggaaaaaatgatcggcgatctgctgtaatcattcttagcgtgaccgggaagtcggtcacgctacctcttctgaagcctgtctgtcactcccttcgcagtgtatcattctgtttaacgagactgtttaaacggaaaaatcttgatgaatactttacgtattggcttagtttccatctctgatcgcgcatccagcggcgtttatcaggataaaggcatccctgcgctggaagaatggctgacatcggcgctaaccacgccgtttgaactggaaacccgcttaatccccgatgagcaggcgatcatcgagcaaacgttgtgtgagctagtggatgaaatgagttgccatctggtgctcaccacgggcggaactggcccggcgcgtcgtgacgtaacgcccgatgcgacgctggcagtagcggaccgcgagatgcctggctttggtgaacagatgcgccagataagcctgcattttgtaccaactgcgatcctttcgcgtcaggttggtgtgattcgcaaacaggcgctgatccttaacttacccggtcagccgaagtctattaaagagacgctggaaggtgtgaaggacgctgcgggtaacgttgtggtacacggtatttttgccagcgtaccgtactgcattcagttgctggaagggccatacgttgaaacggcaccagaagtggttgctgcattcagaccgaagagtgcaagacgcgacgttagcgaataaaaaaatccccccgagcggggggatctcaaaacaattagtgggattcaccaatcggcagaacggtgcgaccaaactgctcgttcagtacttcacccatcgccagatagattgcactggcaccacagatcagaccaatccagccggcaaagtggatgattgcggcgttaccggcaatgttaccgatcgccagcagggcaaacagcacagtcaggctaaagaaaacgaattgcagaacgcgtgcgcctttcagcgtgccgaagaacataaacagcgtaaatacgccccacagacccaggtagacaccaaggaactgtgcatttggcgcatcggtcagacccagtttcggcatcagcagaatcgcaaccagcgtcaaccagaaagaaccgtaagaggtgaatgcggttaaaccgaaagtgttgccttttttgtactccagcagaccggcaaaaatttgcgcgatgccgccgtagaaaatgcccatggcaagaataataccgtccagagcgaaataacccacgttgtgcaggttaagcagaatggtggtcatgccgaagcccatcaggcccagcggtgccggattagccaacttagtgttgcccataattcctcaaaaatcatcatcgaatgaatggtgaaataatttccctgaataacagtagtgttttcagggcgcggcataataatcagccagtggggcagtgtctacgatcttttgaggggaaaatgaaaattttccccggtttacggtgtcagacctgagtggcgctaaccatccggcgcaggcaggcgatttgtattacggctggaattgtcacgcgataggcactgccgctgaccgctttaaccccatttaatgctgcgcccacagggcctcccagacccgcgccgcgcagcaaaccatgcccaagcacgctcattgctgcgtgggtgcgtaaaatgcgggtcaattggctggaaagcaaatgcgacacgccttttgccaataatttgtctttcatcagcagcggcagcagctcttccagctcattcaccctggcatcgaccgcgtgcagaaactcctgcttatgttcctcgtccatattcttccaggtgttacgcagaaattgttccagtaactgttgctcaatctcaaacgtagacatctctttgtcggctttcagcttcaatcgttttgaaacatcgagcaaaatggcccgatacaatttaccgtgtccgcgcagtttgttggcgatactatcgccaccaaaatgctgtaattctccagcaatcagctgccagttgcggcgatgttgctcgggatgcccttccatcgatttaaacagttcgttgcgcatcagtacgctggagaggcgagttttgcctttttcattatgggtgagcaatcgggcgaaatttgccaactgttcctcactacaatgctgaagaaaatccagatctgaatcattcaggtaattaacattcattttttgtggtttctatattctggcgttagtcgtcgccgataattttcagcgtggccatatccgatgagttcaccgtatgaccggaaaaggtgatttttgagacgcagcgtttattgtcgttatcactgttaatgttgatccagtcagtggtttgcccttcttttatttctgaaggaatattcagactctgactggcgctacgggcggctttgaaataaaccgatgcaccgcttaactgtaaatcgccatggtcggcagagagttgtatgcgtttcacaatgcgacaaacaggaagtttcagcgccagatcgttggtttcgttacgcggcattgcaatgacgccgaggagtttatggtcgtttgcctgcgccgtgcagcacagcatcaggctaatcgccaggctggcggaaatcgtaaaaacggatttcataaggattctcttagtgggaagaggtagagggatgaatacccactagtttactgctgataaagagaagattcaggtacgtaatcttttctttttattacaattttttgatgaatgccttggctgcgattcattctttatatgaataaaattgctgtcaattttacgtcttgtcctgccatatcgcgaaatttctgcgcaaaagcacaaaaaatttttgcatctcccccttgatgacgtgggttacgaccccatttagtagtcaaccgcagtgagtgagtctgcaaaaaaatgaaattgggcagttgaaaccagacgtttcgcccctattacagactcacaaccacatgatgaccgaatatatagtggagacgtttagatgggtaaaataattggtatcgacctgggtactaccaactcttgtgtagcgattatggatggcaccactcctcgcgtgctggagaacgccgaaggcgatcgcaccacgccttctattattgcctatacccaggatggtgaaactctggttggtcagccggctaaacgtcaggcagtgacgaacccgcaaaacaccctgtttgcgattaaacgcctgattggccgccgcttccaggacgaagaagtacagcgtgatgtttccatcatgccgttcaaaattattgctgctgataacggcgacgcatgggtcgaagttaaaggccagaaaatggcaccgccgcagatttctgctgaagtgctgaaaaaaatgaagaaaaccgctgaagattacttgggtgaaccggtaactgaagctgttatcaccgtaccggcatactttaacgatgctcagcgtcaggcaaccaaagacgcaggccgtatcgctggtctggaagtaaaacgtatcatcaacgaaccgaccgcagctgcgctggcttacggtctggacaaaggtactggcaaccgtactatcgcggtttatgacctgggtggtggtactttcgatatttctattatcgaaatcgacgaagttgacggcgaaaaaaccttcgaagttctggctaccaacggtgatacccacctggggggtgaagacttcgacagccgtctgatcaactacctggttgaagaattcaagaaagatcagggcattgacctgcgcaacgatccgctggcaatgcagcgcctgaaagaagcggcagaaaaagcgaaaatcgaactgtcttccgctcagcagaccgacgttaacctgccgtacatcactgcagatgcgaccggtccgaaacacatgaacatcaaagtgactcgtgcgaaactggaaagcctggttgaagatctggtaaaccgttccattgagccgctgaaagttgcactgcaggacgctggcctgtccgtatctgatatcgacgacgttatcctcgtgggtggtcagactcgtatgccaatggttcagaagaaagttgctgagttctttggtaaagagccgcgtaaagacgttaacccggacgaagctgtagcaatcggtgctgctgttcagggtggtgttctgactggtgacgtaaaagacgtactgctgctggacgttaccccgctgtctctgggtatcgaaaccatgggcggtgtgatgacgacgctgatcgcgaaaaataccactatcccgaccaagcacagccaggtgttctctaccgctgaagacaaccagtctgcggtaaccatccatgtgctgcagggtgaacgtaaacgtgcagctgataacaaatctctgggtcagttcaacctggatggtatcaacccggcaccgcgcggcatgccgcagatcgaagttaccttcgatatcgatgctgacggtatcttgcacgtttccgcgaaagataaaaacagcggtaaagagcagaagatcaccatcaaggcttcttctggtctgaacgaagatgaaatccagaaaatggtacgcgacgcagaagctaacgccgaagctgaccgtaagtttgaagagctggtacagactcgcaaccagggcgaccatctgctgcacagcacccgtaagcaggttgaagaagcaggcgacaaactgccggctgacgacaaaactgctatcgagtctgcgctgactgcactggaaactgctctgaaaggtgaagacaaagccgctatcgaagcgaaaatgcaggaactggcacaggtttcccagaaactgatggaaatcgcccagcagcaacatgcccagcagcagactgccggtgctgatgcttctgcaaacaacgcgaaagatgacgatgttgtcgacgctgaatttgaagaagtcaaagacaaaaaataatcgccctataaacgggtaattatactgacacgggcgaaggggaatttcctctccgcccgtgcattcatctaggggcaatttaaaaaagatggctaagcaagattattacgagattttaggcgtttccaaaacagcggaagagcgtgaaatcaaaaaggcctacaaacgcctggccatgaaataccacccggaccgtaaccagggtgacaaagaggccgaggcgaaatttaaagagatcaaggaagcttatgaagttctgaccgactcgcaaaaacgtgcggcatacgatcagtatggtcatgctgcgtttgagcaaggtggcatgggcggcggcggttttggcggcggcgcagacttcagcgatatttttggtgacgttttcggcgatatttttggcggcggacgtggtcgtcaacgtgcggcgcgcggtgctgatttacgctataacatggagctcaccctcgaagaagctgtacgtggcgtgaccaaagagatccgcattccgactctggaagagtgtgacgtttgccacggtagcggtgcaaaaccaggtacacagccgcagacctgtccgacctgtcatggttctggtcaggtgcagatgcgccagggattcttcgctgtacagcagacctgtccacactgtcagggccgcggtacgctgatcaaagatccgtgcaacaaatgtcatggtcatggtcgtgttgagcgcagcaaaacgctgtccgttaaaatcccggcaggggtggacactggagaccgcatccgtcttgcgggcgaaggtgaagcgggcgagcatggcgcaccggcaggcgatctgtacgttcaggttcaggttaaacagcacccgattttcgagcgtgaaggcaacaacctctattgcgaagtcccgatcaacttcgctatggcggcgctgggtggcgaaatcgaagtaccgacccttgatggtcgcgtcaaactgaaagtgcctggcgaaacccagaccggtaagcttttccgtatgcgcggtaaaggcgtcaagtctgtccgcggtggcgcacagggtgatttgctgtgccgcgttgtcgtcgaaacaccggtaggcctgaacgagaagcagaaacagttgctgcaagagctgcaagaaagcttcggtggcccaaccggtgagcacaacagcccgcgctcaaagagcttctttgatggtgtgaagaagttttttgacgacctgacccgctaacctccccaaaagcctgcccgtgggcaggcttgggtaaaattagggtgcgttgaagatatgcgagcacctgaaaagtggcggggatcactccccgccgttgctcttactcggattcgtaagccgtgaaaacagcaacctccgtctggccagttcggatgtgaacctcacagaggtcttttctcgttaccagcgccgccactacggcggtgatacagatgacgatcagggcgacaatcatcgccttatgctgcttcattgctctcttctccttgaccttacggtcagtaagaggcactctacatgtgttcagcatatagggggcctcgggttgatagtaaaatatcactcggggcttttctctatctgccgttcagctaatgcctgagacagatagcctcaagcacccgccgctattatatcgctctctttaacccattctgttttatcgattctaatcctgaagacgcctcgcatttttgtggcgtaattttttaatgatttaattatttaactttaatttatctatttatcgcaattattgacgacaagctggattatttttgaaatattgtcctaacaaataacgccgactgacaagaaattaattattacttttcctaattaatccctcagaaatcctgaccttaagctatgattatcagggcttagggtcacccgttagcgctgatatgactttccgtgttaaaccggaatctctaattttgacgattttctttttaggtttaattccctgagggcgacgtagcagtaaatccgacggtgaatcacgctgatattcgcgggttggataccgcattacagaggtccgtcatatgagcctgccactttcttacgtcgcgaatcagctttgttccgccgtcgccaagcgctaacgtgggttactcttgtaccgggctacgtcgccttcagggaactggttattctcattttttatttgtgacattgtggttgttgtgcgacagacattgctattcggcccatatcccagataaaacccgccagctcacgtgcaacagcaacaattgtaatattgacattctttcctttggcctgaagttttcgatacctcttacaaagcctgagttgagcatcccatgctctgtcaatgacggggcggggtaaattttcctgccttttttgtattgccggactgatgcgtgccggatgacggtaactccacgctgcctcgaccaatagctttctggcatagctgtttccggctttggtaatgctgccctgatgtctgcttccacccgatgaatattctgatggcgtgataccaaaccatgacatcagttgtcgtggatgttcaaaacgggtcagatcacccagttcagaaattaatccaaccgcagtaataaactgaatccctcgcatggcttgcagcgcctctactaccggatacagcctccattcggtaacggcctccttcagggcggattccagccgttcacattgtgcctgccgatcttctattgtacgacggtgttcgtcaaaagctaattgtcgccagggactttcgaatgagtatttgctgagccagcgtcggtgtgcagggccccaatctgctcgcccgacataatggaccccatgaaccagaagaaacgatttcagacgttgccttgcatgccgtaaatcatcgcgggcagatgcccatgcccgggccaaatcccggaatgcctcatcttcaatgccgggtacgtagacagcagaaagatctcctgtcagcgccagtgatataagacggtaattcgccatttggattgtccgctccacccaacatgttgtttccttaaggttctcacaccagaaaggacatcaacatgctgagcagagaggacttttacatgataaagcaaatgcgccagcagggcgcgtacatcgtcgatattgcgactcagattggttgctctgaacggacggtcagacgctacctcaaataccctgaaccgccagccagaaagacccgccacaaaatggttaagctgaaaccgtttatggattacatcgacatgcgcctggcagagaatgtctggaatagcgaggttatcttcgcggagattaaggcaatgggttatacgggcggacgttccatgctgcgttactacatccagcccaaacgtaaaatgcgtccgtcaaaaagaacagttcgcttcgaaactcagcctggataccagctccagcatgactggggcgaagttgaggtggaggttgccgggcaacggtgcaaagttaactttgcggttaatacgctggggttctcccgcagcttccatgtcttcgccgcaccaaaacaggatgctgagcatacctacgaatcactggttcgcgccttccactacttcggtggttgtgtgaaaacggtgctggttgataaccagaaggctgcggtgctgaagaataacaacgggaaagtcgtgttcaactccggattcctgttgctggctgaccactataacttcctgccacgggcatgccgtccacgcagggccagaacaaaaggtaaggttgagcggatggtgaaatacctcaaggagaacttcttcgtccggtaccgcaggttcgacagcttcactcatgtcaatcaacaactggagcaatggatagccgatgtggctgacaaacgggagcttcgccagttcaaagaaacgccggaacagcgcttcgcgctggagcaggaacatctgcagccgttaccggatacagacttcgataccagttacttcgatatccgccatgtgtcctgggacagctatatcgaggttggtggtaatcgttacagcgttcccgaagcgctgtgtggttagccggtatcgatacgaatatcgctggatgacgagttgcggatctacagtaatgagaaactggtggcctcacatcgcctctgttcagcatcgtctggctggcagacagtgccggagcatcacgccccgctctggcagcaggtcagtcaggtggaacatcgaccactgagtgcctatgaggagctgttgtgatgcatgaactggaagtcctgctgagtcgcctgaaaatggagcatctgagttatcacgttgaaagcctgctggaacaggcagctaaaaaagagctgaactaccgggagttcctgtgcatggcgctacagcaggaatggaacggcaggcatcagcgcggtatggagtccaggctgaagcaggctcgtctgccgtgggtcaaaacgctggagcagttcgactttaccttccagccgggcatcgaccgtaaggttgtccgggaactggctggtctggcgttcgtggagcgcagcgaaaacgtgatcctgctgggccctcctggtgtcggaaaaactcatctggccatagctcttggcgtgaaagcggtggatgcgggacatcgggtactgtttatgccactggacagactgatcgcgacactgatgaaagcgaaacaggaaaaccggctggagcgtcagctacagcaactgagttatgcccgggtgttgatcctggatgaaataggctatctgccgatgaacagagaggaagccagtctgttcttccggctactgaaccgtcgatatgaaaaagcgagcatcatactgacgtcaaacaaagggttcgcagactggggagaaatgttcggagatcacgtactggcaacagcgatcctggatcggctgctacatcactcaaccacgctgaatatcaaaggagagagttaccggttaaaagagaaacgtaaagctggagtgctgaccaaaaacacaacgccaatcagtgatgatgaaatggtggaaagcggacagcatcagtaacgaaagtatttagcgggcatgaaaatggcaaataacggtcaaacatcgtggcgttgacactcctgcacgcagtgaacgcacaagtctgatggcatcacggcgatcggttttaacccgctcccccggttttttcgggataagtgagggggcgcagaccatgcagtcaaaaccggatttcaccagccggcgataaagtccataaccacagggccccgcttcataaacgatactgacctgcgatgactttgacctgagacgtttacaaagattctgaatatcagtaggtgatgtgccaattttacccatcagttcaacaggttctgaattgatagcataagcgacagtaatcgattctttgtgaacatctaacccgacgtacaatgtgttattgttgttcatgctggcctccgtggtggaaataccggggtgtagcaacagctcacccatgcggctctgacaacgatgttaacccgcgttaaatatcccacgttggccagcatctgtctcacggaaagtcatactgccttacagccgtcaaaaactcatctcaccgctgatggcgcaaatcctttaattgctcgtaaaaaacgagttattcctacactataatctgattttaacgatgatttgtgcggggtaaaatagtaaaaacgatctattcacctgaaagagaaataaaaagtgaaacatctgcatcgattctttagcagtgatgcctcgggaggcattattcttatcattgccgctatcctggcgatgatgatggccaacagcggcgcaaccagtggatggtatcacgactttctggagacgccggttcagctccgggttggttcactcgaaatcaacaaaaacatgctgttatggataaatgacgcgctgatggcggtatttttcctgttagtcggtctggaagttaaacgtgaactgatgcaaggatcgctagccagcttacgccaggccgcatttccggttatcgccgctattggtgggatgattgttccggcattactctatctggcctttaactatgccgatccgattacccgcgaagggtgggcgatcccggcggctactgacattgcctttgcacttggtgtgctggcgctgttgggaagtcgtgttccgttagcactgaagatctttttgatggctctggctattatcgacgatcttggggccatcattatcatcgcattgttctacactaatgacttatcgatggcctctcttggcgtcgcggctgtagcaattgcggtactcgcggtattgaatctgtgtggtgtacgccgcacgggcgtctatattcttgttggcgtggtgttgtggactgcggtgttgaaatcgggggttcacgcaaccctggcgggggtaattgtcggcttctttattcctttgaaagagaagcatgggcgttctccagcgaagcgactggagcatgtattgcacccgtgggtggcgtatctgattttaccgctgtttgcatttgctaatgctggcgtttcactgcaaggcgtcacgctggatggcttgacctccattctgccattggggatcatcgctggcttgctgattggcaaaccgctggggattagtctgttctgctggttggcgctgcgtttgaaactggcgcatctgcctgagggaacgacttatcagcaaattatggcggtggggatcctgtgcggtatcggttttactatgtctatctttattgccagcctggcctttggtagcgtagatccagaactgattaactgggcgaaactcggtatcctggtcggttctatctcttcggcggtaattggatacagctggttacgcgttcgtttgcgtccatcagtttgacaggacggtttaccggggagccataaacggctcccttttcattgttatcagggagagaaatgagcatgtctcatatcaattacaaccacttgtattacttctggcatgtctataaagaaggttccgtggttggcgcagcggaggcgctttatttaactccacaaaccattaccggacagattcgagcgctggaagagcgcctgcaaggcaaattatttaaacgcaagggacgtggtctcgaacccagcgagctgggagaactggtctatcgctatgccgataaaatgttcaccttaagccaggaaatgctggatattgtgaactatcgcaaagaatccaatttattgtttgacgttggcgtggctgatgcactttccaaacgcctggtcagtagcgtacttaacgccgcagtggtagaaggcgagcccattcatcttcgctgcttcgaatccacccacgaaatgctgctggagcaattaagtcagcataaactggatatgatcatttctgactgtccgatagactctacgcagcaggaaggcctgttctccgtgagaattggcgaatgtggcgtgagtttctggtgtacaaatccaccaccagaaaaatcgttcccggcttgtctggaagaacggcgacttttgattcctgggcgacgttcaatgttagggcgcaaattgcttaactggtttaactcccagggattaaacgtagaaatcctcggcgagtttgatgatgccgcgttgatgaaagcttttggtgcgatgcacaatgcaatcttcgttgccccaacgctttatgcatatgacttttatgccgataaaactgtcgtagaaattggtcgcgtcgagaatgtgatggaagagtaccatgctatttttgctgagcggatgattcagcacccggcggtacagcgaatctgcaatacggattattctgcgctttttagtccagcggcgcgttaatcggcacctcccccaaagttaaggtgggggagatagattagttgtacataaccacgattttgactcggctcattatttgcccgcttgagacattatttccatatgtacgcgggcgaataaatagaggaatctgattacttccttcatggggatgctgaaaagagtagtaattgcttttaccatactggatttcattcgtaccatcattggagagttgaaagcctacttgacccgcaccgtcctcactgttttctaactcattttttaatatgctggttcctgactcctgtatcgtcactggttcaaagtaatattcaacatcactgggttcaaaaactaattcaccttgctcgccctggatgcagtcaaatcttatatgatgaaactgataattttcattattgatacgagacagtacaaatcgtccagtgtcgatggattgatcttcaaaaccacaggtcattaaatttacctgtaaaatagtatttaaattataattaaagcggacgctattacaattagtattattccctgtacatgaactcacttcaatttcgaacaacaaaggaaaaggagttcctggaaaaatatctgcggtgttggaactatctgatacagatgcgatagagtatggaatggtgaaatttatcgcagatagcatttcttctaaattataagatgaccttcctggaagctctatttttttaccgtcagattcaaaggggaaattaataatataatgacgacttccgactttaaaccttaaagcgttctgtgttaaaaaatgaactttaatggcgttggtcgtctcttgtaagtctgcacactcaatgatatttccggtgttttcaattttttcggcggtgagattacctttcatactcagtggcttgagtatatatgttccacgttgttccccgacattggtcaatgcacagggagcactttgcacaataaaagaatatagactcaaggtgattaataaaagccacttcatagtaaactccttttactggcatatatatgttttgttttcatcgataacgtgttgaaaagtaatagtacagaataagttctgttcatcattgagagcaacttttattccagtgggaatttcatctacgcgaataaaaaggcgactaccctggccaacgactccaatattattttcctggagatccagtacgtcatagccaaaggttaatggcgaaccatcgggacgcagtgcctgtatataccagggcttacgttggtcagttgtaaactgcacataagaaactgctccacggtaaggtgcaataatttgacgattgccctgcaattctgtttcactttcactgtttgctatatcaagtaccagatggttttcacgatgaggtattatcaggtcgtaaacaacctggcctttgctgtttgttcgattgtatttttgtccattaatatgtgcaccttctaacccaggcgcatccagaattgcaaatgtatcggataactggttagtgatattaataccaccgggccagacaactaatccactactaatacttccaccactttgccaggcgtttttagaatgactatagctgccatctattatggcgatgggagttctccagcttaaattcgtaccaagcgaggtatcattattttgttgttgctgattaacatatataccataatttaactgatcatgttcaccggctatgccagtaattccagtattgttggaggaatagccatctttggaaaatgaggtcgaattcgataagttaatttggtgacgtattttggcaatatcaggtgatgctgccaacttactgatttagtgtatgatggtgtttttgaggtgctccagtggcttctgtttctatcagctgtccctcctgttcagctactgacggggtggtgcgtaacggcaaaagcactgccggacatcagcgctatctctgctctcactgccgtaaaacatggcaactgcagttcacttacaccgcttctcaacccggtacgcaccagaaaatcattgatatggccatgaatggcgttggatgccgggcaactgcacgcattatgggcgttggcctcaacacgattttacgtcacttaaaaaactcaggccgcagtcggtaacctcgcgcatacagccgggcagtgacgtcatcgtctgcgcggaaatggacgaacagtggggctatgtcggggctaaatcgcgccagcgctggctgttttacgcgtatgacagtctccggaagacggttgttgcgcacgtattcggtgaacgcactatggcgacgctggggcgtcttatgagcctgctgtcaccctttgacgtggtgatatggatgacggatggctggccgctgtatgaatcccgcctgaagggaaagctgcacgtaatcagcaagcgatatacgcagcgaattgagcggcataacctgaatctgaggcagcacctggcacggctgggacggaagtcgctgtcgttctcaaaatcggtggagctgcatgacaaagtcatcgggcattatctgaacataaaacactatcaataagttggagtcattacccaatatcatccccccagtagaaaggaatggagataaacagattaaaacgctcctcttctttattattttcatcataagattggctggcagagaaagtataactaatgtgttgccagttattggagtaactgaattggtaatctttagcatttccacttcgcccccagtaattccgccaaagcgcacttaatgatacatttcccagattattggataaaggttgcataatattggcagaaaggctattttttctgccaatatcataaaaatcatcataatcactctgatgatagtgtttatcattttcgtaaagatggtcgctgaatgtcctgtaatcctgcgaagcataacgccaggcggccacgctaaatcgagtggctgtttgtactagatatttattataggcgacctgatagctcgtaccttcgtgtctggtatcattatttaacttactactcgatcgggcagcgtaaaaagagatggcacccagcggtgtattccaaccatttcccagagttatagcattatagttatcggataaaatcgtacccgattatgtgatcaggttgttattatttagattaatgtttaaattttttaatttcttgatgtgaagttgatgaaagtttgaaaatttaatattcttaattgttcccttctttataagaagagcaaggtgccatcattagagtgacagagtaggatgtttcagagcatgcttcagattgttttttatttctctgcagtgtattaataatcatcacagataatttcattctaaaattacctctttctttgagtgttttaatcctgatgaactatattttttataaggagcatgcactcgttgatgctctgaaggtattttctcatttttgatgatgttttgtcgtaatcgtgcataaacttattaagttctttatacacatcattatttagctttacattatcgcgaactaaagtttgtaccaatggtatcaaaatttcgaaacgggacggtttgtcatcaatacttgccagggttttgaatactcctgtgtatctgtaacctaagtgcttattgacaagttgagtggtccatcggccaggcataatatcttcacagcgcaaattttttatcatggtattagtgaacgatgttccaaatatgttgctttttttaatgaagaggttgtttatttctccatttgaaaagatggtgtttgataagtcgctttcaaaacatgatatattggttaatacacaacaaaaataatacccatatgaaaggttgctcttttctattgttatatttgatagcaacattttatgtatattaatattaagggcagtcaaatactggatcttttgatcgttaagttcatacatctccagtgatttattatagggtaataaaagtataaattcctttatattatctccgcagtaagaaaagacgacattaaatttattagtggccatgttttcagttgagcagtaagctgatttttctattaaccgactgggcacgcttttaaataaagataattttccacatagttttgaatatgccgaattgctagttttaaagttctgccacattattccctggttatcatctatcgatgaggaggggattttattgcattgctcattgtatagctcagggaaaatattttttttaataagctttttgatttcctggttaagatgactttttttcttgtctattgcactgtattttgcgttttgtgacgtttcctgatgatcataaaatgactggagatttctgcaggcctcataaaatatttcaggagtatatagctgtgggtatatttcttggttgaagtttgcctttaaaaaattaacgaatttttcatggcattcttggtatatcttaatctcttcagaaagacattcgcttgttctgtcatcaaaaacatccaatctaagtaatgtgatacctttgtgtttaaaaaataaaattgaactgtatgttctatgagtttacatctataaaaatatgcatctctcagatgagtatattgaaaaaaatgatgaaggactggagatggtttaggcaagttatggcttctaaaaaagtcatcaaacaaaattaagaactctgttttatactcgcaaaatacttttactaactcattttgtcttgttttatttattattacatcatctactatatttgatttataaagacaatgtggcgaagttgagataccatttgtcattatcagtccttgaagttgatgaatttttattaatttaatttatgagtgaatgtgactactatcaaaaatagctcattaattttatgaagtagaatataaataggtatttaacctgtgttgattgttgttaattatttacaagatctaataaggagatatttatgaatggttaaagtgtataggaatttaattcaaaaatagagtggtcttaagtttaatacctcaatgtgtatcacaatatccacattctttgtaggggagtctggagattgagtagatattcttgttcagaatgtatcagccgatggttctacgattcttaagccacgaagagttcagaaagtgtaacggcatgtctgcaaaagccagcatcttttgactatctggcaaccggtagtgtgttctctcacgcatcataaaagcagcaggcataaaaaaaacccgcttgcgcgggctttttcacaaagcttcagcaaattggcgattaagccagtttgttgatctgtgcagtcaggttagccttatgacgtgcagctttgtttttgtggatcagacctttagcagcctgacggtccacgatcggttgcatttcgttaaatgctttctgtgcagcagctttgtcgccagcttcgatagctgcgtatactttcttgatgaaagtacgcatcatagagcgacggcttgcgttgtgcttacgagccttttcagactgaatggcgcgcttcttagctgatttgatattagccaaggtccaactcccaaatgtgttctatatggacaattcaaaggccgaggaatatgcccttttagccttcttttgtcaatggatttgtgcaaataagcgccgttaatgtgccggcactcgttacgtagtgatggcgcaggattctaccagcttgcggggtgtgaatacagcttttccgcgataaaaattgcagcaggcggtcactttcttcccgtgatttgcgccatggcaatgaaaagccacttctttctgatttcggtactcaatcgccggttaaccttgaccgctgtacaaggtatactcggacgattttcactgttttgagccagacatgaagctgatacgcggcatacataatctcagccaggccccgcaagaagggtgtgtgctgactattggtaatttcgacggcgtgcatcgcggtcatcgcgcgctgttacagggcttgcaggaagaagggcgcaagcgcaacttaccggtgatggtgatgctttttgaacctcaaccactggaactgtttgctaccgataaagccccggcaagactgacccggctgcgggaaaaactgcgttaccttgcagagtgtggcgttgattacgtgctgtgcgtgcgtttcgacaggcgtttcgcggcgttaaccgcgcaaaatttcatcagcgatcttctggtgaagcatttgcgcgtaaaatttcttgccgtaggggatgatttccgctttggcgctggtcgtgaaggcgatttcttgttattacagaaagctggcatggaatacggcttcgatatcactagtacgcaaactttttgcgaaggtggcgtgcgtattagcagcaccgctgtgcgtcaggcgctggcggatgacaatctggctctggcagaaagtttactggggcacccgtttgccatctccgggcgtgtagtccacggtgatgaattagggcgcactataggtttcccgacggcgaatgtaccgctacgccgtcaggtttccccggtgaaaggggtttatgcggtagaagtgctgggcctcggtgaaaagccgttacccggcgtggcaaacatcggaacacgcccaacggttgccggtattcgccagcagctggaagtgcatttgttagatgttgcaatggacctttacggtcgccatatacaagtagtgctgcgtaaaaaaatacgcaatgagcagcgatttgcgtcgctggacgaactgaaagcgcagattgcgcgtgatgaattaaccgcccgcgaattttttgggctaacaaaaccggcttaagcctgttatgtaatcaaaccgaaacacggaaccgagaatctgatgagtgactataaatcaaccctgaatttgccggaaacagggttcccgatgcgtggcgatctcgccaagcgcgaaccgggaatgctggcgcgttggactgatgatgatctgtacggcatcatccgtgcggctaaaaaaggcaaaaaaaccttcattctgcatgatggccctccttatgcgaatggcagcattcatattggtcactcggttaacaagattctgaaagacattatcgtgaagtccaaagggctttccggttatgactcgccgtatgtgcctggctgggactgccacggtctgccgatcgagctgaaagtagagcaagaatacggtaagccgggtgagaaattcaccgccgccgagttccgcgccaagtgccgcgaatacgcggcgacccaggttgacggtcaacgcaaagactttatccgtctgggcgtgctgggcgactggtcgcacccgtacctgaccatggacttcaaaactgaagccaacatcatccgcgcgctgggcaaaatcatcggcaacggtcacctgcacaaaggcgcgaagccagttcactggtgcgttgactgccgttctgcgctggcggaagcggaagttgagtattacgacaaaacttctccgtccatcgacgttgcttttcaggcggtcgatcaggatgcactgaaagcaaaatttgccgtaagcaacgttaacggcccaatctcgctggtgatctggaccactacgccgtggactctgcctgcgaaccgcgcaatctctattgcacctgatttcgactatgcgctggtgcagatcgacggtcaggccgtgattctggcgaaagatctggttgaaagcgtaatgcagcgtatcggcgtgaccgattacaccattctcggcacggtaaaaggtgcggagcttgagttgctgcgctttacccatccgtttatgggcttcgacgttccggcaatcctcggcgatcacgttaccctagatgccggtaccggtgccgttcacaccgcgcctggccacggcccggacgactatgtgatcggtcagaaatacggcctggaaaccgctaacccggttggcccggacggcacttatctgccgggcacttatccgacgctggatggcgtgaacgtcttcaaagcgaacgacatcgtcgttgcgctgctgcaggaaaaaggcgcgctgctgcacgttgagaaaatgcagcacagctatccgtgctgctggcgtcacaaaacgccgatcatcttccgcgcgacgccgcagtggttcgtcagcatggatcagaaaggtctgcgtgcgcagtcactgaaagagatcaaaggcgtgcagtggatcccggactggggccaggcgcgtatcgagtcgatggttgctaaccgtcctgactggtgtatctcccgtcagcgcacctggggcgtaccgatgtcactgttcgtgcacaaagacacggaagagctgcatccgcgtactctcgaactaatggaagaagtggcaaaacgcgttgaagttgacggcatccaggcgtggtgggatcttgatgcgaaagagatcctcggcgatgaagctgatcagtacgtgaaagtgccggacacattggatgtatggtttgactccggatctacccactcttctgttgttgacgtgcgtccggaatttgccggtcacgcagcggacatgtatctggaaggttctgaccagcaccgtggttggttcatgtcttccctaatgatctccaccgcgatgaaaggcaaagcgccgtatcgtcaggtactgacccacggctttaccgtggatggtcagggtcgcaagatgtctaaatccatcggcaataccgtttcgccgcaggatgtgatgaacaaactgggcgcggatattctgcgtctgtgggtggcatcaaccgactacaccggtgaaatggccgtttctgacgagatcctgaaacgtgctgccgatagctatcgtcgtatccgtaacaccgcgcgcttcctgctggcaaacctgaacggttttgatccagcaaaagatatggtgaaaccggaagagatggtggtactggatcgctgggccgtaggttgtgcgaaagcggcacaggaagacatcctcaaggcgtacgaagcatacgatttccacgaagtggtacagcgtctgatgcgcttctgctccgttgagatgggttccttctacctcgacatcatcaaagaccgtcagtacaccgccaaagcggacagtgtggcgcgtcgtagctgccagactgcgctgtatcacatcgcagaagcgctggtgcgctggatggcaccaatcctctccttcaccgctgatgaagtgtggggctacctgccgggcgaacgtgaaaaatacgtcttcaccggtgagtggtacgaaggcctgtttggcctggcagacagtgaagcgatgaacgatgcgttctgggacgagctgttgaaagtgcgtggcgaagtgaacaaagtcattgagcaagcgcgtgccgacaagaaagtgggtggctcgctggaagcggcagtaaccttgtatgcagaaccggaactgtcggcgaaactgaccgcgctgggcgatgaattacgatttgtcctgttgacctccggcgctaccgttgcagactataacgacgcacctgctgatgctcagcagagcgaagtactcaaagggctgaaagtcgcgttgagtaaagccgaaggtgagaagtgcccacgctgctggcactacacccaggatgtcggcaaggtggcggaacacgcagaaatctgcggccgctgtgtcagcaacgtcgccggtgacggtgaaaaacgtaagtttgcctgatgagtcaatcgatctgttcaacagggctacgctggctgtggctggtggtagtcgtgctgattatcgatctgggcagcaaatacctgatcctccagaactttgctctgggggatacggtcccgctgttcccgtcgcttaatctgcattatgcgcgtaactatggcgcggcgtttagtttccttgccgatagcggcggctggcagcgttggttctttgccggtattgcgattggtattagcgtgatcctggcagtgatgatgtatcgctcgaaggccacgcagaagctaaacaatatcgcttacgcgctgattattggcggcgcgctgggcaacctgttcgaccgcctgtggcacggcttcgttgtcgatatgatcgacttctacgtcggcgactggcacttcgccaccttcaaccttgccgatactgccatctgtgtcggtgcggcactgattgtgctggaaggttttttgccttctagagcgaaaaaacaataataaaccctgccggatgcgatgctgacgcatcttatccggcctacagattgctgcgaaatcgtaggccggataaggcgtttacgccgcatccggcaaaaatcctcaaatataagagcaaacctgcatgtctgaatctgtacagagcaatagcgccgtcctggtgcacttcacgctaaaactcgacgatggcaccaccgccgagtctacccgcaacaacggtaaaccggcgctgttccgcctgggtgatgcttctctttctgaagggctggagcaacacctgttggggctgaaagtgggcgataaaaccaccttctcgttggagccagatgcggcgtttggcgtgccgtcaccggacctgattcagtacttctcccgccgtgaatttatggatgcaggcgagccagaaattggcgcaatcatgctttttaccgcaatggatggcagtgagatgcctggcgtgatccgcgaaattaacggcgactccattaccgttgatttcaaccatccgctggccgggcagaccgttcattttgatattgaagtgctggaaatcgatccggcattggaggcgtaacatgcagatcctgttggccaacccgcgtggtttttgtgccggggtagaccgcgctatcagcattgttgaaaacgcgctggccatttacggcgcaccgatatatgtccgtcacgaagtggtacataaccgctatgtggtcgatagcttgcgtgagcgtggggctatctttattgagcagattagcgaagtaccggacggcgcgatcctgattttctccgcacacggtgtttctcaggcggtacgtaacgaagcaaaaagccgcgatttgacggtgtttgatgccacctgtccgctggtgaccaaagtgcatatggaagtcgcccgcgccagccgtcgtggcgaagagtcgattctcatcggccacgccgggcatccggaagtggaaggtacaatgggccagtacagtaacccggaagggggaatgtatctggtcgaatcgccggacgatgtgtggaaactgacggtcaaaaacgaagagaagctctcctttatgacccagaccacgctgtcggtggatgacacgtctgatgtgatcgacgcgctgcgtaaacgcttcccgaaaattgtcggtccgcgcaaagatgacatctgctacgccacgactaaccgtcaggaagcggtacgcgccctggcagaacaggcggaagttgtgttggtggtcggttcgaaaaactcctccaactccaaccgtctggcggagctggcccagcgtatgggcaaacgcgcgtttttgattgacgatgcgaaagatatccaggaagagtgggtgaaagaggttaaatgcgtcggcgtgactgcgggcgcatcggctccggatattctggtgcaaaatgtggtggcacgtttgcagcagctgggcggtggtgaagccattccgctggaaggccgtgaagaaaacattgttttcgaagtgccgaaagagctgcgtgtcgatattcgtgaagtcgattaagtcattagcagcctaagttatgcgaaaatgccggtcttgttaccggcattttttatggagaaaacatgcgtttacctatcttcctcgatactgaccccggcattgacgatgccgtcgccattgccgccgcgatttttgcccccgaactcgacctgcaactgatgaccaccgtcgcgggtaatgtctcggttgagaaaaccacccgcaacgccctgcaactgctgcatttctggaatgcggagattccgctcgcccagggagccgctgtgccgctggtacgcgcaccgcgtgatgcagcatctgtgcacggcgaatcgggaatggctggctacgactttgttgagcacaaccgaaagccaatcgggataccagcgtttctggcgattcgtgatgccctgatgcgtgcaccagagcctgttaccctggtggccattggcccgttaaccaatattgcgctgttactttcacaatgcccggaatgtaaaccgtatattcgtcgtctggtgatcatgggcggttcttctggtcgcggcaactgtacaccaaatgccgagtttaatatcgctgccgatccagaagcggctgcctgtgtcttccgtagcggaatcgaaatcgtcatgtgcggtctggatgtcaccaatcaggcaatattaacccctgactatctcgctactttgccggagttgaatcgcaccggaaaaatgcttcatgcactgtttagccactaccgtagcggcagtatgcaaagcggtctgcgaatgcacgatctctgcgccatcgcctggctggtgcgcccggacttattcaccctcaagccgtgttttgtcgcggtagaaactcaaggcgaatttacctcaggcacgacggtggttgatatcgacggttgcctgggcaaaccagccaatgtaaaggtggcattggatctggatgtgaaaggcttccagcagtgggtggctgaggtgctggctctggcgtcgtaacctgtcacatgttatcggcatgcagtcattcatcgactcatgcctttcactgatatccctccctgtttatcattaatttctaattatcagcgtttttggctggcggcgtagcgatgcgctggttactctgaaaacggtctatgcaaattaacaaaagagaatagctatgcatgatgcaaacatccgcgttgccatcgcgggagccggggggcgtatgggccgccagttgattcaggcggcgctggcattagaaggcgtgcagctgggcgcggcgctggagcgcgaaggatcttctttactgggcagcgacgccggtgagctggctggtgcagggaaaacaggcgttaccgtgcaaagcagcctcgatgcggtaaaagatgattttgatgtgtttatcgattttacccgtccggaaggtacgctgaaccatctcgctttttgtcgccagcatggcaaagggatggtgatcggcactacggggtttgacgaagccggtaaacaggcgattcgtgacgccgccgccgatattgcgattgtctttgccgccaattttagcgttggcgttaacgtcatgcttaagctgctggagaaagcagccaaagtgatgggtgactacaccgatatcgaaattattgaagcacatcatagacataaagttgatgcgccgtcaggcaccgcactggcaatgggagaggcgatcgcccacgcccttgataaagatctgaaagattgcgcggtctacagtcgtgaaggccacaccggtgaacgtgtgcctggcaccattggttttgccaccgtgcgtgcaggtgacatcgttggtgaacataccgcgatgtttgccgatattggcgagcgtctggagatcacccataaggcgtccagccgtatgacatttgctaacggcgcggtaagatcggctttgtggttgagtggtaaggaaaatggtctttttgatatgcgagatgtacttaatctcaataatttgtaaccacaaaatatttgttatggtgcaaaaataacacatttaatttattgattataaagggctttaatttttggcccttttatttttagtgttatgtttttaaatattctataagtgccaaaaattacatgttttgtcttctgtttttgttgttttaatgtaaattttgaccatttggtccactttttcctgctcgtttttatttcatgcaatcttcttgctgcgcaagcgttttccagaacaggttatatgatctttttgtcgcttaatgcctgtaaaacatgcatgagccacaaaataatataaaaaataccgccattaagttgacttttagcgcccatatctccagaatgccgccgtttgccagaaattcgtcggtaagcagatttgcattgatttacgtcatcattgtgaattaatatgcaaataaagtgagtgaatattctctggagggtgttttgattaagtcagcgctattggttctggaagacggaacccagtttcacggtcgggccataggggcaacaggttcggcggttggggaagtcgttttcaatacttcaatgaccggttatcaagaaatcctcactgatccttcctattctcgtcaaatcgttactcttacttatccccatattggcaatgtcggcactaatgacgccgatgaagaatcttctcaggtacatgcacaaggtctggtgattcgcgatctgccgctgattgccagcaacttccgtaataccgaagacctctcttcttacctgaagcgccataacatcgtggcgattgccgatatcgatacccgtaagctgacgcgtttactgcgcgagaaaggcgcacagaatggctgcattatcgcaggcgataacccggatgcggcgttggcgttagaaaaagcccgcgcgttcccaggtctgaatggcatggatctggcaaaagaagtgaccaccgcagaagcctatagctggacacaagggagctggacgttgaccggcggcctgccagaagcgaaaaaagaagacgagctgccgttccacgtcgtggcttatgattttggtgccaagcgcaacatcctgcggatgctggtggatagaggctgtcgcctgaccatcgttccggcgcaaacttctgcggaagatgtgctgaaaatgaatccagacggcatcttcctctccaacggtcctggcgacccggccccgtgcgattacgccattaccgccatccagaaattcctcgaaaccgatattccggtattcggcatctgcctcggtcatcagctgctggcgctggcgagcggtgcgaagactgtcaaaatgaaatttggtcaccacggcggcaaccatccggttaaagatgtggagaaaaacgtggtgatgatcaccgcccagaaccacggttttgcggtggatgaagcaacattacctgcaaacctgcgtgtcacgcataaatccctgttcgacggtacgttacagggcattcatcgcactgataaaccggcgttcagcttccagggtcacccggaagccagccctgggccacacgacgcagcgccgttgttcgaccactttatcgagttaattgagcagtaccgtaaaaccgctaagtaatcaggagtaaaagagccatgccaaaacgtacagatataaaaagtatcctgattctgggtgcgggcccgattgttatcggtcaggcgtgtgagtttgactactctggcgcgcaagcatgtaaagccctgcgcgaagagggttaccgcgtcattctggtgaactccaacccggcgaccatcatgaccgacccggaaatggccgatgcgacctacatcgagccgattcactgggaagtagtacgcaagattattgaaaaagagcgcccggacgcggtgctgccaacgatgggcggtcagacggcgctgaactgcgcgctggagctggagcgtcagggcgtgttggaagagttcggcgtgactatgattggtgcgaccgccgatgcgattgataaagcagaagaccgccgtcgtttcgacgtagcgatgaagaaaattggtctggaaaccgcgcgttccggtatcgcacacacgatggaagaagcgctggcggttgccgctgacgtgggcttcccgtgcattattcgcccatcctttaccatgggcggtagcggcggcggtatcgcttataaccgcgaagagtttgaagaaatttgcgcccgcggtctggatctctccccaaccaaagagctgctgattgatgagtcgctgatcggctggaaagagtacgagatggaagtggtgcgtgataaaaacgacaactgcatcatcgtctgctctatcgaaaactttgatgcgatgggcatccataccggtgactccatcactgtcgcgccagcccaaacgctgaccgacaaagaatatcaaatcatgcgtaacgcctcgatggcggtgctgcgtgaaatcggcgttgaaaccggtggttccaatgtccagtttgcggtgaacccgaaaaacggtcgcctgattgttatcgaaatgaacccacgcgtgtcccgttcttcggcgctggcgtcgaaagcgaccggtttcccgattgctaaagtggcggcgaaactggcggtgggttacaccctcgacgaactgatgaacgacatcactggcggacgtactccggcctccttcgagccgtccatcgactatgtggttactaaaattcctcgcttcaacttcgaaaaattcgctggtgctaacgaccgtctgaccactcagatgaaatcggttggcgaagtgatggcgattggtcgcacgcagcaggaatccctgcaaaaagcgctgcgcggcctggaagtcggtgcgactggattcgacccgaaagtgagcctcgatgacccggaagcgttaaccaaaatccgtcgcgaactgaaagatgctggcgcagagcgtatctggtacatcgccgatgccttccgtgcgggcctgtctgtggacggcgtgttcaacctgaccaatattgaccgctggttcctggtacagattgaagaactggtgcgtctggaagagaaagtagcggaagtgggcatcactggcctgaacgctgaattcctgcgccagctgaaacgcaaaggctttgccgatgcgcgtctggcaaaactggcgggcgtgcgcgaagcggaaatccgcaagctgcgcgaccagtatgacctgcacccggtttataagcgcgtggatacctgtgcggcagagttcgccaccgacaccgcttacatgtactccacttatgaagaagagtgcgaagcgaatccgtctaccgaccgtgaaaaaatcatggttctcggcggcggcccgaaccgtatcggtcagggtatcgaattcgactactgctgtgtacacgcctcgctggcgctgcgcgaagacggttacgaaaccattatggttaactgtaacccggaaaccgtctccaccgactacgacacttccgatcgcctctacttcgagccggtaactctggaagatgtgctggaaatcgtgcgtattgagaagccgaaaggcgttatcgttcagtacggcggtcagaccccgctgaaactggcgcgcgcgctggaagctgctggcgtaccggttatcggcaccagcccggatgctatcgaccgtgcagaagaccgtgaacgcttccagcatgcggttgagcgtctgaaactgaaacaaccggcgaacgccaccgttaccgctattgaaatggcggtagagaaggcgaaagagattggctacccactggtggtacgtccgtcttacgttctcggcggtcgggcgatggaaatcgtctatgacgaagctgacctgcgtcgctacttccagacggcggtcagcgtgtctaacgatgcgccagtgttgctggatcacttccttgatgacgcggtagaagttgacgtggatgccatctgcgacggcgaaatggtgctgattggcggcatcatggagcacatcgagcaggcgggcgtgcactccggtgactccgcatgttctctgccagcctacaccttaagtcaggaaattcaggatgtgatgcgccagcaggtgcagaaactggccttcgaattgcaggtgcgcggtctgatgaacgtgcagtttgcggtgaaaaacaacgaagtctacctgattgaagttaacccgcgtgcggcgcgtaccgttccgttcgtctccaaagccaccggcgtaccgctggcaaaagtggcggcgcgtgtgatggctggcaaatcgctggctgagcagggcgtaaccaaagaagttatcccgccgtactactcggtgaaagaagtggtgctgccgttcaataaattcccgggtgttgacccgctgttagggccagaaatgcgctccaccggggaagtgatgggcgtgggccgcaccttcgctgaagcgtttgccaaagcgcagctgggcagcaactccaccatgaagaaacacggtcgtgcgttgctttccgtgcgcgaaggcgataaagaacgcgtggtggacctggcggcaaaactgctgaaacagggcttcgagctggatgcgacccacggcacggcgattgtgctgggcgaagcgggcattaatccgcgtctggtgaacaaggtgcatgaaggccgtccgcacattcaggaccgcatcaagaatggcgaatatacctacatcatcaacaccacttcaggccgtcgcgcgattgaagactcccgcgtgatccgtcgcagtgcgctgcaatataaagtgcattatgacaccaccctgaacggtggtttcgctaccgcgatggcgctgaatgccgacgcgaccgaaaaagtaatttcggtgcaggaaatgcacgcgcagatcaaataatagcgtgtcatggcggatatttttcatccgctaatttgatcgaataagtaatacggttctctgatgaggaccgttttttttgcccattaagtaaatcttttggggaatcgatatttttgatgacataagcaggatttagctcacacttatcggtaatgactccaacttattgatagtgttttatgttcagataatgcccgatgactttgtcatgcagctccaccgattttgagaacgacagcgacttccgtcccagccgtgccaggtgctgcctcagattcaggttatgccgctcaattcgctgcgtatatcgcttgctgattacgtgcagctttcccttcaggcgggattcatacagcggccagccatccgtcatccatatcaccacgtcaaagggtgacagcaggctcataagacgccccagcgtcgccatagtgcgttcaccgaatacgtgcgcaacaaccgtcttccggagactgtcatacgcgtaaaacagccagcgctggcgcgatttagccccgacatagccccactgttcgtccatttccgcgcagacgatgacgtcactgcccggctgtatgcgcgaggttaccgactgcggcctgagttttttaagtgacgtaaaatcgtgttgaggccaacgcccataatgcgtgcagttgcccggcatccaacgccattcatggccatatcaatgattttctggtgcgtaccgggttgagaagcggtgtaagtgaactgcagttgccatgttttacggcagtgagagcagagatagcgctgatgtccggcagtgcttttgccgttacgcaccaccccgtcagtagctgaacaggagggacagctgatagaaacagaagccactggagcacctcaaaaacaccatcatacactaaatcagtaagttggcagcatcaccacacttatcgacggtgaagttgcatactatcgatatatccacaattttaatatggccttgtttaattgcttcaaaacgagtcatagccagacttttaatttgtgaaactggagttcgtatgtgtgaaggatatgttgaaaaaccactctacttgttaatcgccgaatggatgatggctgaaaatcggtgggtgatagcaagagagatctctattcatttcgatattgaacacagcaaggcggttaataccctgacttatattctgtcggaagtcgcagaaataagctgcgcagttaagatgatccctaataagctggaaggacggggatgccagtgccagcgactggtaaaagtggtcgatatcgatgagcaaatttacgcgcgcctgcgcaataacagccgggataaattagtcggcgtaagaaagacgccgcgtattcctgccgttccgctcacggaacttaaccgcgagcagaagtggcagatgatgttgtcaaagagtatgcgtcgttaatgtcatttcgttgataccacgcagcctggttgctggatgcaatgctggcgcatcttatccagcctacggttgctctccagccgggttggataaggcgtttatgccgcatccgacagctatcgccggatgcgatgctggcgcatcttatccggcctacggttgctctccagcagagttggataaggcgtttacgccgcatccggcaagatcaccgtttaggcgtcacatccgtcgtcccctgcaaacgggggcgattttcctccatttgcctcagtggctgtgtttcatgtaacgatgcatgacagcgcccgacaagatcctgatactctttggtattcaaccgtttccagtgtaactcgtcgtcactaacactgcgtacagcgcgggctggcgtacccatcaacaactggcgtttctcgccgtgaaagcctgctttgacaaagctcatggcggcaacaatgctctcttcgccaatgaccgcgccatccataatcacgctgttcatcccgaccaatgcatcgcgaccaatcacacaaccatgcaggatcgctccgtgcccgatatggccgttttccccaacgatggtgtcagtgtcgcagtagccatgcataatgcagccatcctgaatattggctcccgcttgcacgatcaaccgcccgtagtcaccacgcagtgaggcgagtgggccgatgtagacaccggctcccacaatcacatcgccaatcaagacggcactgggatggacaaacgccgtcgggtgaaccaccggaattaacccctcaaaggcgtaatagctcacggttgttaacgtcctttccacaccggatcgcgcttctcggcaaacgccagcggcccttcaatggcatcctccgaatgcagaaccgacggatagtgtttcaacacgccgctgcgaatatagcgatacgcttcttctaccggcatttcgctggtggtgcggaagatctctttcagcgccgcaatcgccagcggggcgctgttaaccagctgctgcgccagttcgcgggcgttatccatcagttccgcctggctaaccacgcggttgactatcccccaacgcagcgcctcttctgcgcccattcgtctgccggtcatcaccatttcattgacgatggcaggcggcaggatcttcggtagacgcagcacgccgccgctgtcaggaacgatgcccagcttggcttccggcagggcgaagctggcgttatcggcacaaacaataaaatctgccgccagcgccagttcgaaaccgccgccaaaggcatagccgttcacagctgcgataaccggtttgtcgagattgaaaatttcggttaatcccgcaaatccacccgggccaaagtcagcatccggtgcttcgccttctgctgccgcttttaaatcccagcccgcggaaaagaacttctctccggcaccggtaataatggcgacacgtaattgcggatcgtcacggaaatttagaaatacttcgcccatttcaaagctggtttttgcatcaatagcattcgcttttggacgatcaagggtaatttccagaattgatccattgcgggtcagatgtaatgattcactcattccttttctccatttttgctttttcagggacgacaacatccctgcaaaaaatgcatattgttttatagcgtgattattagttggcagggtagttccctgctgtttcatttatttcagattctttctaattattttccccgagcaattacgtggcagatcttttctgatctccagataagagggcactttaaatttcgccatattttgttcgcagaagcggaaaaattcctcttcgctcaatgtttcaccttcattcagcaccacaaatgctttgatggcttcatcgcgaatcgaatctttaatacccacaaccacgatatcctgaatttttggatgggtggcgatgatattttccagctccacgcaggagacattctcgccaccgcgtttgatcatattgcagcggcgatcgacgaaataaaaaaagccctcttcgtcgcagtatccggtatcgccggtatgtagccagccgtcggcttccagcactttcgcagtggctttcgggttgagaaaatactctttgaagatggttttccctggtacgcctttaatacagatttcaccgatctcacctgccgggagcgggcgattgtgatcgtcgcggatctccgcttcgtagcaaaaccccgcccgaccaatcgacggccagcgtcgtttatcgccagggcgatcgccgataatgcccacaatggtttccgtcatcccataagacgtcagcaagcgaacgccgaagcgttcacaaaacgcatctttttcctgctccgacaagttgagataaaacatcacttcccgcaggcggtgttgccgatcgttcgctgaaggcggctgcgccatcaaggtacggatcatcatcggaatacattcggtaacggtggcgcggtacttctgtacctgtccccagaaggcgcgggcgctgtatttctcgaccagcacaaaggtggccccggcagaaaacgccgccatcgccgcagtacactggcaatcgatatgaaacgcaggcattaccgtcaggtagacgtcatcgtcacgcagtgcacactgccaggcggagtaatatccagcgaagcgcaggttgtaatgggtaatcaccacacctttcggtcgggaggtggtgccggaggtgaagagaatttccgccgtatcgtcagtcgatagcggcggtgcatagcacaaggtggcaggttgttgatttttcagttgagtaaacgaactcacgccatcatcagcgggaagtgccacatctgtcaggcaaatgtgccgcaattgagtggcatcttcctgctgaatctgttgatacataggatagaattgcgcactggtcaccagcaggcacgcctggctattttgcaggatccacgcgctttcctcgcgcaacaggcgggcgttaatcggcaccataatcgcgccaatttttgccagcccgaaccagcaaaagataaattccgggcagttgtcgagatgtagagcaaccttgtcgcctttgcgaatccccagcgtataaaacaggtttgtcgtgcggttaatctcctgatttaactcaagataactataccggttaacgactccgccgctggattcacaaatcagcgccgttttatgaccgtaaacgtccgccagatcgtcccacatttgacgtagatgttgtccgccaatgatatccattgcacctctatccatttttgttcgtttgttattgggcgggcgctagtcaggcaagccgactgacgccacgcgtttagtcctcaactttggccagacctttgctgaccaactcctgaatgtcgttttcgctgtagccgatatttttcaaaatggcagccgtgtccatgccatgtgagggcattccgcgccagatttgtccggggttatttttgaatttcggcatgatgttcggccctttgcaggtgcgaccatccatcgtttgccactgagtgattgattcacgggcaacatactgtggattgctttccagttccggtacggtcagtactttggcacaggcgatattcagttcggcaaagcgttctttaacttctgcgatggtatgtgccgccagccaggcatcgagtttttcttctaccagtgggccgtaagggcattcgatacggtggataagctgagtgccttccgggatttccggcgtaccgagtagatgtgcgaggccaatatctttaaagcactcttcaatttgggtaatgcccaccagttccatcacgatgtagccgtcggcgcatttatacagaccgcaaccggcgtagtagggatctttacctttgctcatgcgcgggcacatttcgccgccgttgaagtaatccatcatgaagtactggcccatacgcagcatcacttcatacatggcgatgtcgatactttcgcctttaccggtttcacgcactttatgcagtgctgccagcgccgccgtggtggcggtcaggccagaaaagtaatcggcggtatacgggaaggcaggcattggctggtcaacatcaccgttctgaatcaggtaaccactgaaggcctgggcgatggtgttataggccggaagattggtgtactcctcggtgccgtactgaccaaaaccggacaggtgagcgataaccagtttcgggttgtgctgccacagtacttcatcggtaatgccacgacgggcaaaggccggacctttgctggcttcgatgaagatatcggtggtttccattaatttcagaaacgcttcgcggccttcatctttgaaaatatttaacgacagcgcgtgcaaattgcggcgggagagctgcgggtagttcggttgaacgcgaatggtgtcggcctaggcgacgttctcgatccagataacttccgcaccccattctgcgaacatttgcccggcgaacggcccggcgatttcgataccggagaagacaacgcgcaatccggccaacggcccgaatttcggcatgggtagatgatccattattagctcctgaaaaatttatgtagcgcatgactgccggatgcggcgtaaacgctttatccggcctacattcgtgctcccgtaggcctgataagacgcattagcgtcgcatcaggcagcgcacggacttagcggtattgcttcagcaccgcgcgacccagcgtcaggatctgcatttcgtcagatcccccggagacgcggtctacacgcagatcacgccagaagcggctgatgcggtggttgcccgcaatcccgacaccgcccagcacctgcattgcgctatccacaacttcaaatgccgcattggcgcagaagtatttgcacatcgctgcatcgccagaggtgatggtgccgttgtctgctttccacgctgcttcatacagcatgtttttcatggagtttaatttgatcgccatgtgggcgaatttttcctgaatcaactggaaacgaccaatagcctcgccaaactgcacgcgctgattggcgtagcgcgccgcatcttcaaaagcgcacatcgccgtaccgtagttggtgagggctaccaggaaacgttcatggtcgaactcttctttgacgcggttaaagccgttaccttcccgaccgaacatgtctttctcgtccagttccacgtcgtcaaaggtgatttcacagcagctatccatacgcagaccgagcttttcaagtttggtcactttgatgcccggtttgctcatatcaacaaaccattcggtgtagacaggtttgtccggagaagccccgtcgcgcgccatcaccacgatgtacggggtgtaggcgctgctggtaataaaacacttactaccattaagataaatcttaccatttctacgggtataagtcgttttcaggctacccacgtcggagcccgcgcccggttcggtaatcgctgagttccacatctgcttaccggtgccgcggaaagccataattttgtcgatctgctcttgtgtgccttcgcgcaggaaggtgttgaacccgcccggcaactggtacagcacataggttggtgcccccagacgtcccagctccatccacacggcggcgagagtaacaaaccccgcgtccagaccaccgtgctcttcagggatcagcagactgtcgatacccatatccgccagtgctttgacaaaacgttccgggtagacgctgtcacggtcgcactcggcaaaataggcctcccagttttcgctggccatcagttcgcggataccggcgacaaacagttcctgctcatcatttaaattaaaatccatctttcaacctcttgatattttgggggttaattaatctttccagttctgtttcgcgtctttaataaaggagagcgtcaccataatgttgacgaagaacagcgggcatcctccggcgataatggcggtttgaatcggtttcaggccgccgagcgccagcagaacaataccgataatgccaaccagaattgaccaaccgatacgcaccagcagaggtggttcttcaccatcgcgtacttcgcggcaagtggacatcgccagggtataagagcaggcgttaaccagcgtaacggtggcaataaagcagaggatgaagaagccccacatggtggcggtgctgagtggcagagcggcccaggtttcaatgatggcgcgcgccacaccgtactgttcgatcagatttggaatgttgatgatgtttttatctatcaacagcagagtgttactaccgagtacagtccacaggatccaggttgacgctgtcagccccagcaccatgccgaagcacagttcacgcacagtacgaccacgggagatgcgggcgaggaagatactcatctggatagcataaatcacccaccatgcccagtagaacacggtccagccctgcgggaagccgcctttagcgatgggatcggtatagaacaacatgcgcggcagatacatcagcaacatccccaccgaatcggtgaagtagttcatgatgaagctggcaccgctgacaatgaacacccaacccagcatcaggaagctcaggtaactacgcacgtcactggcgatacgtacccctttttgcagaccgcaagcgacgcaaatggcgttgaggataatccagcaggtaatgatgatagcgtccagttgcagggtatgcggaatgccaaacaaccattgcatacactcggtcaccagcggcgtggcaaggcccagactggtacccatcgcgaagatcaaggcgacgagatagaagttgtcgacgatagtgccgaacaaccctttggcgtgtttttcacctaccagcggcaccagtgtcgagctggggcgaatcacttccattttgcggacaaagaagaagtaagcgaaggcgactgaaaggaagctgtaagtggcccacggcagaggtccccagtggaacaagctgtaagccagccccaactctttcgcccctgtcgagttcggttctaagccaaacggcggggtggagatgtagtagtagatctcaatcgatccccagaacagtacggcagcagacgtacaggaggcgaacatcataaagatccaactggcggtactaaattcaggtggttcgttacctaaacgctttttggcatacgggccaaacaccagccagaaccaaccgaaaagcatcaccaccatataccattcaaatgcccatccccatacattggtgacgtaactgaatacagcattaataacgacattcgctgcatccagatctctgactgtaagccaacaaagtatgccgacgattattaacggcggaaagaaaaccttcggttctattcccgtttttctcttttcattcttcatgagttaattccactgtgaaaacgaatatttattttgcgttcccgtttgttttatttttgttaacatttgatataattattattaacctcgtggacgcgttaatggctaactcataatgggtattcaataagctgcattctgtgattgttatcacattttttttcgggtgaatagagggcgcttttctcgttaattttgattattaatcagtttgttatgttgtgttgtgagtaaaaaaatagcatctgactttcaatattggtgatccataaagcaatattgaaaatttcttttttctacgccatgttttcaatattggtgaggaacttaacaatattgaaagttggatttatctgcgtgtgacattttcaatattggtgattaaagttttatttccaaattaaagggcgtgatatctgtaattaacaccaccgatatgaacgacgtttccttcatgatttctggagatgcaatgaagattattacttgctataagtgcgtgcctgatgaacaggatattgcggtcaataatgctgatggttcattagacttcagcaaagccgatgccaaaataagccaatacgatctgaacgctattgaagcggcttgccagctaaagcaacaggcagcagaggcgcaggtgacggccttaagtgtgggcggtaaagccctgaccaacgccaaagggcgtaaagatgtactatcgcgcggcccggatgaactgattgtggtgattgatgaccagttcgagcaggcactgccgcaacaaacggcgagcgcactggctgcagccgcccagaaagcaggctttgatttgatcctctgtggcgatggttcttccgacctttatgcccagcaggttggtctgctggtgggcgaaatcctcaatattccggcagttaacggcgtcagcaaaattatctccctgacggcagataccctcaccgttgagcgcgaactggaagatgaaaccgaaaccttaagcattccgctgcctgcggttgttgctgtttccactgatatcaattccccacaaattccttcgatgaaagccattctcggcgcggcgaaaaagcccgtccaggtatggtcggcggcggatattggttttaacgcagaggcagcctggtcagaacaacaggttgccgcgccgaaacagcgcgaacgtcagcgcatcgtgattgaaggcgacggcgaagaacagatcgccgcatttgctgaaaatcttcgcaaagtcatttaattacaggggatgctatgaacacgttttctcaagtctgggtattcagcgataccccttctcgtctgccggaactgatgaacggtgcgcaggctttagctaatcaaatcaacacctttgtcctcaatgatgccgacggcgcacaggcaatccagctcggcgctaatcatgtctggaaattaaacggcaaaccggacgatcggatgatcgaagattacgccggtgtcatggctgacactattcgccagcacggcgcagacggcctggtgctgctgccaaacacccgtcgcggcaaattactggcggcaaaactgggttatcgccttaaagcggcggtgtctaacgatgccagcaccgtcagcgtacaggacggtaaagcaacagtgaaacatatggtttacggtggtctggcgattggcgaagaacgcattgccacgccgtatgcggtactgaccatcagcagcggcacgttcgatgcggctcagccagacgcgtcacgcactggcgaaacgcacaccgtggagtggcaggctccggctgtggcgattacccgcacggcaacccaggcgcgccagagcaacagcgtcgatctcgacaaagcccgtctggtggtcagcgtcggtcgcggtattggcagcaaagagaacattgcgctggcagaacagctttgcaaggcgataggtgcggagttggcctgttctcgtccggtggcggaaaacgaaaaatggatggagcacgaacgctatgtcggtatctccaacctgatgctgaaacctgaactgtacctggcggtggggatctccgggcagatccagcacatggttggtgctaatgcatcgcaaaccattttcgccatcaataaagataaaaatgcgccgatcttccagtacgcggattacggcattgttggtgacgccgtgaagatccttccggcgctgaccgcagctttagcgcgttgatccactctggcagggctgcattttggccctgccgctgacagggagctcttatgtccgaagatatctttgacgccatcatcgtcggtgctgggcttgccggttcggttgccgcactggtgctcgcccgcgaaggggcgcaagtgttagttatcgagcgtggcaattccgcaggtgccaagaacgtcaccggcgggcgtctctatgcccacagcctggaacacattattcctggtttcgccgaatccgccccggtagaacgcctgatcacccatgaaaaactcgcgtttatgacggaaaagtcagcgatgactatggactactgcaacggtgacgaaacctcgccatcccagcgttcttactccgttttgcgcagtaaatttgatgcctggctgatggagcaggccgaagaagcgggcgcgcagttaattaccgggatccgcgtcgataacctcgtacagcgcgatggcaaagtcgtcggtgtagaagccgatggcgatgtgattgaagcgaaaacggtgatccttgctgatggagtgaactccatccttgccgaaaagctggggatggcaaaacgcgttaaaccgacggatgtggcggttggcgtgaaggaactgatcgagttaccgaagtcggtaatcgaagaccgttttcagttgcagggtaatcagggcgcggcttgtctgtttgcgggatcacccaccgatggcctgatgggcggcggcttcctttataccaatgaaaataccctgtcgctggggctggtttgtggtctgcatcatctgcatgacgcaaaaaaatcggtgccgcaaatgctggaagatttcaaacagcatccggcagtggcaccgctgatcgcgggcggcaagctggtggaatattccgctcacgtagtgccggaagcaggcatcaacatgctgccggagttggttggtgacggcgtattgattgccggtgatgccgccggaatgtgtatgaacctcggttttaccattcgcggtatggatctggcgattgccgccggggaagccgcagcaaaaaccgtgctttcagcgatgaaaagcgacgatttcagtaagcaaaaactggcggaatatcgtcagcatcttgagagtggcccgctgcgcgatatgcgtatgtaccagaaactaccggccttccttgataacccacgcatgtttagcggctacccggaactggcggtgggcgtggcgcgtgacctgttcaccattgacggcagtgcgccggaactgatgcgcaagaaaatcctccgccacggcaagaaagtgggcttcatcaatctgatcaaggatggcatgaaaggagtgaccgttttatgacttctcccgtcaatgtggacgtcaaactgggcgtcaataaattcaatgtcgatgaagagcatccgcacattgttgtgaaggccgatgccgataaacaggccctggagctgctggtgaaagcgtgccccgcaggtctgtacaagaagcaggatgacggcagtgtgcgcttcgattacgccggatgtctggagtgcggcacctgtcgcattctggggctggggtcggcgctggaacagtgggaatacccgcgcggcacctttggtgtggagttccgttacggctgatgttggtttgatacgtaacgccgtactgactctcattgcaaaaaaacaggaataacccatgcaaccgtccagaaactttgacgatctcaaattctcctcaattcaccgccgcattttgctgtggggaagcggtggtccgtttctggatggttatgtactggtaatgattggcgtggcgctggagcaactgactccggcgctaaaactggacgctgactggattggcttgttgggcgcgggaacgctcgccgggctgttcgttggcacatcgctgtttggctatatttccgataaagtaggacggcgcaaaatgttcctcattgatatcatcgccatcggcgtgatatcggtggcgacgatgtttgtttcatcccccgtcgaactgttggtgatgcgggtacttatcggcattgtcatcggtgcagattatcccatcgccacctcaatgatcaccgagttctccagtacccgtcagcgggcattttccatcagctttatcgccgccatgtggtatgtcggcgcgacctgcgccgatctggtcggctactggctttatgatgtggaaggcggctggcgctggatgctgggtagcgcggcgatcccctgtttgttgattttgattggtcgattcgaactgcctgaatctccccgctggttattacgcaaagggcgagtaaaagagtgcgaagagatgatgataaaactgtttggcgaaccggtggctttcgatgaagagcagccgtagcaaacccgttttcgcgatctgtttaatcgccgccattttccttttgttctgtttgttgccgccatctggacctgccaggtgatcccaatgttcgccatttacacctttggcccgcaaatcgttggtttgttgggattgggtgttggcaaaaacgcggcgctggggaacgtggtgattagcctgttctttatgctcggctgtattccgccgatgctgtggttaaacactgccggacggcgtccattgttgattggcagctttgccatgatgacgctggcgctggcggttttggggctgatcccggatatggggatctggctggtagtgatggcctttgcggtgtatgcctttttctctggcgggccgggtaatttgcagtggctctatcctaatgaactcttcccgacagatatccgcgcctctgccgtgggcgtgattatgtccttaagccgtattggcaccattgtttcgacctgggcactgccgatctttatcaataattacggtatcagtaacacgatgctaatggaggcgggtatctcgctgtttggcttgttgatttccgtagcgtttgccccggagactcgagggatgtcactggcgcaaaccagcaatatgacgatccgcgggcagagaatggggtaaattgttcagatttctctcttttctgaatcaatattattgactataagccgcgtgaatatatgactacactttgtgggaaaacaaaggcgtaatcacgcgggctacctatgattcttataatttatgcgcatccgtatccgcatcattcccatgcgaataaacggatgcttgaacaggcaaggacgctggaaggcgtcgaaattcgctctctttatcaactctatcctgacttcaatatcgatattgccgccgagcaggaggcgctgtctcgcgccgatctgatcgtctggcagcatccgatgcagtggtacagcattcctccgcttcttaaactttggatcgataaagttttgtcgcacggctgggcttacggtcacggcggcaaggcgctgcatggcaaatatttgctgtgggcggtgacgaccggcggcggggaaagccattttgaaattggtgcgcatccgggctttgatgtgctgtcgcagccgctacaggcgacggcaatctactgcgggctgaactggctgccaccgtttgccatgcactgcacctttatttgtgacgacgaaaccctcgaagggcaggcgcgtcactataagcaacgtctgctggaatggcaggaggcccatcatggatagccatacgctgattcaggcgctgatttatctcggttcggcagcgctgattgtacccattgcggtacgtcttggtctgggatcggtacttggctacctgatcgccggctgcattattggcccgtgggggctgcgactggtgaccgatgccgaatctattctgcactttgccgagattggggtggtgctgatgctgtttattatcggcctcgaactcgatccacaaaggctgtggaagctgcgtgcggcagtgttcggcggtggcgcattgcagatggtgatttgcggcggcctgctggggctgttctgcatgttacttgggctgcactggcaggtcgcggaattgatcggcatgacgctggcgctctcctctacggcgattgccatgcaggcgatgaatgaacgcaatctgatggtgacgcaaatgggtcgcagtgcctttgcggtgctgctgttccaggatatcgcggcgatcccgctggtggcgatgattccgctactggcaacgagcagtgcctcgacgacgatgggcgcatttgctctctcggcgttaaaagtggcgggtgcgctggtgctggtggtattgctggggcgctatgtcacgcgtccggcgctgcgttttgtagcccgctctggcttgcgggaagtgtttagtgccgtggcgttattcctcgtgtttggctttggtttgctgctggaagaggtcggcttgtcgatggcgatgggcgcgtttctggcgggcgtactgctggcaagctcggaataccgtcatgcgctggagagcgatatcgaaccatttaaaggtttgctgttggggctgtttttcatcggtgttggcatgtcgatagactttggcacgctgcttgaaaacccattgcgcattgtcattttgctgctcggtttcctcatcatcaaaatcgccatgctgtggctgattgcccgaccgttgcaagtgccaaataaacagcgtcgttggtttgcggtgttgttagggcagggcagtgagtttgcctttgtggtatttggcacggcgcagatggcgaatgtgctggaaccggagtgggcgaaatcgctgaccctggcggtggcgctgtcgatggcggcaacgccgattctgctggtgatcctcaatcgccttgagcaatcttctactgaagaggcgcgtgaagctgatgagatcgacgaagaacagccgcgggtaatcattgccggattcggtcgttttgggcagatcaccggacgtttactgctctccagcggggtgaaaatggtggtgctcgatcacgatccggaccatatcgaaaccttgcgtaaatttggtatgaaagtgttttatggcgatgccacgcggatggatttactggaatctgcgggagcggcgaaagcggaagtgctgattaacgccatcgacgatccgcaaaccaacctgcaactgacagagatggtgaaagaacacttcccgcatttgcagattattgcccgcgcccgcgatgtcgaccactacattcgtttgcgtcaggcaggcgttgaaaagccggagcgtgaaaccttcgaaggtgcgctgaaaaccgggcgtctggcactggaaagtttaggtctggggccgtatgaagcgcgagaacgtgccgatgtgttccgccgctttaatattcagatggtggaagagatggcaatggttgagaacgacaccaaagcccgcgcggcggtctataaacgcaccagcgcgatgttaagtgagatcattaccgaggaccgcgaacatctgtcattaattcaacgacatggctggcagggaaccgaagaaggtaaacataccggcaacatggcggatgaaccggaaacgaaaccctcatcctaataaagagtgacgtaaatcacactttacagctaactgtttgtttttgtttcattgtaatgcggcgagtccagggagagagcgtggactcgccagcagaatataaaattttcctcaacatcatcctcgcaccagtcgacgacggtttacgctttacgtatagtggcgacaattttttttatcgggaaatctcaatgatcagtctgattgcggcgttagcggtagatcgcgttatcggcatggaaaacgccatgccgtggaacctgcctgccgatctcgcctggtttaaacgcaacaccttaaataaacccgtgattatgggccgccatacttgggaatcaatcggtcgtccgttgccaggacgcaaaaatattatcctcagcagtcaaccgggtacggacgatcgcgtaacgtgggtgaagtcggtggatgaagccatcgcggcgtgtggtgacgtaccagaaatcatggtgattggcggcggtcgcgtttatgagcagttcctgccaaaagcgcagaaactgtatctgacgcatatcgacgcagaagtggaaggcgacacccatttcccggattacgagccggatgactgggaatcggtattcagcgaattccacgatgctgatgcgcagaactctcacagctattgctttgagattctggagcggcggtaattttgtatagaatttacggctagtgccggatgcgacgccggtcgcgtcttatccggccttcctatatcaggctgtgtttaagacgccgccgcttcgcccaaatccttatgccggttcgacggctggacaaaatactgtttatcttcccagcgcaggcaggttaatgtaccaccccagcagcagccggtatccagcgcgtatataccttccggcgtacctttgccctccagcgatgcccagtgaccaaaggcgatgctgtattcttcagcgacagggccaggaatcgcaaaccacggtttcagtggggctggggcctcttccggcgattctttgctgtacatatccagttgaccgttcgggaagcaaaaacgcatacgggtaaaagcgttggtgataaaacgcagtcttcccagcccccgcaattccggtgaccagttatttggcatatcgccgtacatagcgtcgagaaagaagggataggagtcactcgatagcaccgcttctacatcgcgcgcgcactctttggcggtctgtagatcccactgcggcgtgatccctgcgtgggccatcaccaactttttctcttcgtcgatttgcagcaaaggctggcgacgcagccagttaagcagctcgtcggcatccggcgcttccagcagcggtgtcaggcgatctttcggtttattgcggctgatcccggcaaataccgccagcagatgcagatcgtgattgcccagcaccagacgtacgctgtcgcctaaggatttcacatagcgcagaacatccagcgaacccggcccgcgcgcgaccagatcgcccgtcagccagagggtatctttcccaggggtaaattctactttatgcagcaatgcgatcagttcatcgtaacaaccatgaacgtcgccaataaggtatgtcgccatattcttttaatgaatgagtgtgggaacggcgagtcggaatacgggaatgtcgatgctgaaagggacgccattttcatcgatcatttcgtagtgaccctgcatggtgcccagcggggtttcaatgattgcaccgctggtgtactggtactcttcgccaggcgcgataagtggctggacgccaaccactccttcgccctggacttcggtttcacggccattgccattggtgatcagccagtaacgccccaacaactgcactggcgctcgccccagattgcgtatggttacggtataagcaaaaacgtaacgttcattatcaggtgaagattgtgcctcaatgtagacgctttgaacctgaatacacactcggggcgaattgatcatcgttaactctcctgcaaaggcgcgttctccgccagatagttcgccatctggcaatattgcgcgacagagatattttccgctcgcatcgccgggtcgatccccattcccgttaacacctcgacgctaaacaggttgccgaggctgttacgaatggttttacgacgctggttaaaggcttcagtggtgatgcggctcaacacgcgaacatctttaaccgggtgaggcatcgttgcatgaggaaccaggcgcacgacggcggaatccactttgggtggtggtgtaaaggctgacggcggtacttccagcactgggatcacgttgcaatagtattgcgccatgacgcttaatcgaccatacgctttgctgttcggtcctgcaaccagacgattcaccacctctttttgcaacataaagtgcatgtcggcaatggcatcagtatagctaaacagatggaacatcaacggcgtggagatgttataaggcaggttgccgaaaacacgcagcggctgacccattttctcggccagttcgccaaagttaaaggtcatcgcatcctgctgataaatcgtcagtttcgggcctaagaatggatgcgtttgcagacgtgccgccagatcgcggtcaagttcgatgaccgtcagctggtccagacgttcgccgaccggctcggtcaatgccgccagaccggggccgatttcgaccattgcctggcccttttgcgggttaatggcagaaacaatgctgtcgatcacgaactgatcgttgagaaagttttgcccgaagcgtttacgggctaagtggccctggtggactcgattattcattgggtgttaacaatcattttgatggcgagattaagcgccgtaataaaactgccgacatcggcttcgccacgtcccgccagttcaagcgcggtgccgtggtccactgatgtgcgaataaagggcaggcccagcgtaatgttcacaccgcgcccgaagccctggtattttagcacgggaagaccctgatcgtggtacatcgccagcacggcgtcggcgttatcgagatatttcggctgaaacagggtatcggcaggcagcggcccgttgagtttcatcccctgcgcccgcagctcgttgagcaccggaataatggtgtctatctcttccgtacccatatgaccgccttcgcccgcgtgcggattcagcccgcagaccagaatgcgcggttcggcaataccaaattttgtacgcaaatcgtgatgcaaaatagcaatcacttcgtgcaaaagtgcaggggtgatagcatctgcgatatcgcgcagcggtaaatgcgtcgttgccagcgccacgcgaagttcttcggtcgccagcatcatcaccacttttttcgcctgcgagcgctcttcgaaaaactcggtatgaccagtaaacggaatacctgcgtcgttaatgacgcctttatgcacggggcctgtgatcagcgcagcaaattcaccgttcagacagccatcacacgctcgcgccagcgtctccaccacgtaatgcccattttcaatcgctaactgccccgcagtgacagattcgcgtagcgcgacaggaagtagcgttaatgtgcccgcagtttgcggttgtgcaggggagttgggggaataagggcggagggtgagcggcaaaccgagcatcgctgcccggtcggtaaggagagtggcatcggcacaaacaaccagttcgaccggccactcacgctgtgcaagctggacaactaagtccgggccaatcccggcgggctcgccgggagtgatcacaacacgttgggttttaaccattagttgctcaggattttaacgtaggcgctggcgcgttgttcctgcatccagcttgctgcttcttccgagaacttacggttcatcagcatgcggtatgcacgatccttctgcgcagcgtcggttttatcgacattacgggtatccagcagttcgattaaatgccagccgaatgaagagtgaaccggtgcactcatttgacctttgttcaggcgggtcagggcgtcacggaaggccggatcgaaaatatctggtgtagcccagccgagatcaccgccctggttagcagagcctggatcctgagagaactctttcgctgcggcagcaaaagtcgttttaccactcttgatatcggcagcaatctgttccagtttcacacgggcctgttcgtcagtcatgatcggcgacggtttcagcagaatatggcgagcatgaacttcggtcaccgagatatttttgctttcgccgcgcaggtcgttaactttcagaatatggaagccaacgccggaacgaatcgggccaacaatgtcgcctttcttcgcggtgcttaatgcctgggcgaagatacccggcaactcctgaatacggccccagcccatctggccgccgttcagcgcctgctggtcggcagaatgagcaatcgccagcttaccgaaatcagcgccgttacgcgcctgatcgacaatggcgcgcgcctggctttccgcttcgttcacctgatcagaagtcgggttttccggcagcgggatcaggatgtggctcaggttcagctcagtgctggcgtcgttttggttacccacctgctgcgccagggattcgacttcctgcggcaggatggtgatgcgacgacgcacctcgttgttacgcacttcagagataatcatctctttgcggatctggttacgataggtgttgtagttcagaccatcgtaagccagacggctgcgcatctgatccagcgtcatgttgttctgtttcgcgatgttagcaatcgcctgatccagctgctcatcggagattttcactcccattttctgccccatctgcaggatgatttgatccatgatcaaacgttccatgatttggtggcgcagcgtcgcgtcatcaggaagctgctgccttgcctgcgcagcgttcagttttaccgactgcattaatccatcaacgtcgctttccagcacgacgccgttattgacgacggctgcgactttatcgactacctggggggcagcgaaactggtattcgcgatcatggcgataccgagaagcagcgttttccagttcttcatactttttccatttcaattaaccgcactgcggattacgtggtaaatcaacaaatcacaaagtgttttgatacggcagaatgttcgaacgcagcatctcttgcgtacccagaccgtagttggagctcaggccgcgaagttcgatgttaaagccgattgcgttgtcatataccgcatgttgtttatcgttatcccaaccgttcagcttccgctcgtaaccgacgcgaattgcatagcagcaggagctgtattgcacacctaacatagagtcggcttgcttgttcgcattggtgtcgtagtagtaggccccaacaatggaccaacgatcggcaattggccagctggcgacagcacctacctgcgaaataccattcttatattgctcagcagtggaatagtacttaggcagcgtagcctgaatatattccgggctggcgtaacggtaattcagctgtaccagacggtcttcatcccgacggtattcaatgctggagttactggtcgctacgttatccagacgtgtatcgtactgaatcccgccacgcaatccccaacgctcggagatacgccagtaagtatcgcctgcccacaccagtgagcccgttttgtcgtcattctcccatgttatgttgtcatcgccagtgcgagactccgtgaaatagtagatttgaccaacggaaatattaaaacgttcaacggcagcatcatcatatatgcgagatgtgacaccggtcgtcacctggttagcggaggcaatacggtcaagaccgccgtaagtccggtcccggaacaggccagagtagtcagattgcagtagagacgagtcgtagttatagatgtcgctctgatcgcgatacggcacgtacaaatactgcgcgcgcggttccagcgtttgggtataacccggagccagcatttccatatcgcgttcaaagaccattttgccgtcaactttgaattgcggcataacgcggttaacggattcgtccagcttggtcgtgtttctggagttataccagtcaagattggtttgctgataatgggttgccagcaacttcgcttcggtattgatgctgccccagttattagagagcggcaaattgatggtcggttccaggtgaacacgggttgcttcaggcatgtcgtctctggtgttaacaaagtgcactgcctggccgtaaatacgcgtatcaaacggaccaacatcattctggtagtagttaacgtctaactgcggctctgccgagtagctactggtgttctgctcgctaaagacctggaactgcttggttgaaacggtggcattgaagttttgcaccgcatagccaacgctgaatttttgcgttgcgtagccgtcagtactggaaccgtacttgttatcgaaatcattgaagtagctaggatcgctgaccttggtgtagtcgacgttgaaacgccacacttgatccatgaccccggagtgttgccagtagaacaaccaacgacgtgaactgtcatcgttcgggtgttcatcttcatagactttatctgaaggcagatagtccagttccatcaagccagcgcccgcctgggagaggtagcggaattcgttctcccacatgatgttgccacgacgatgcatataatgcggcgtgatggtggcatccatatttggcgcgatgttccagtaatatggcaggtagaactcaaagtagttggtggtggtgtacttggcgttcgggatcaagaaaccagagcgacgtttgtcacccaccggcaactgcaaataggggctataaaagatcggtaccggacccaccttaaagcgggcgttccagatctccgcaacttgttcttcgcggtcatgaataatttcgctacctaccacgctccaggtgtcagaacccggcagacaggaggtaaagctaccgttatccagaatggtatagcggttttcgccacgttgtttcatcaggtccgctttaccgcgaccctggcgacccaccatctggtaatcaccttcccagacgttggtatctttggtgttcagattcgcccagcctttcggccctttgaggatcacctggttatcgtcgtaatggacattaccgagcgcatcaacggtacgtaccggctccggttgtcctggtgcctctttttgatggagctgcacttcgtcggcctgcagacggctgttaccctgcatgatatccacgctgccagtaaacacggcgtcatccgggtagtcccctttcgcgtggtcagcattgatagtcacgggtaagtcattggtatcgccctgtaccagaggacggtcatagcttggcacgcccaacatgcactgtgaggcgaggtcggctgccagtccctgttgactataaagggcggtggcaatcatggtggccaggagagtggggatacgttttttcatacgttgattttattgttccatcatcggtaacgttgcgcgtgacaaacggtcagagactaacgtactcgtcatctctacgctagtgttaatcctgtccgaatagcgtcagtggtgttaggcacggcattgaatgacaggtatgataatgcaaattataggcgatgtcccacaattgaccgcagccggaaaacggtaaaagcacctttatattgtgggagatagccctgatatccgtgtgtcgatttggggaatatatgcagtattggggaaaaatcattggcgtggccgtggccttactgatgggcggcggcttttggggcgtagtgttaggcctgttaattggccatatgtttgataaagcccgtagccgtaaaatggcgtggttcgccaaccagcgtgagcgtcaggcgctgttttttgccaccacttttgaagtgatggggcatttaaccaaatccaaaggtcgcgtcacggaggctgatattcatatcgccagccagttgatggaccgaatgaaccttcatggcgcttcccgtactgcggcgcaaaacgcgttccgggtgggaaaatcagataattacccgctgcgcgaaaagatgcgccagtttcgcagtgtctgctttggtcgttttgacttaattcgtatgtttctggagatccagattcaggcggcgtttgctgatggttcactgcacccgaatgaacgggtggtgctgtatgtcattgctgaagaattagggatctcccgcgcccagtttgaccagtttttgcgcatgatgcagggcggtgcacagtttggcggcggttatcagcagcaatctggcggtggtaactggcagcaagcgcagcgtggcccgacgctggaagatgcctgtaatgtgctgggcgtgaagccgacggatgatgcgaccaccatcaaacgtgcctaccgtaagctgatgagtgaacaccatcccgataagctggtggcgaaaggtttgccgcctgagatgatggagatggcgaagcagaaagcgcaggaaattcagcaggcatatgagctgataaagcagcagaaagggtttaaataagttttaaactgtaggcctgataagacgcggcccgcgtcgcatcaggcaatcggcgcacaattgccggatgcggcgtgaacgccttatccgcctaccgaactgcgccagcgtgacgattaaaaatccgctggcgctttaaacgtcatactattgccatacgccggatgggtaatcgtcaacatctctgcatgtagcaacaaacgcggtgccatcgctctcgcttctggtgatgcataaaaacgatcgccgagaatcggatgacccagcgccagcatatgcacacgcagctgatgcgaacgcccggtaatcggttttaacaccactcttgccgtgttatccgccgcatactccaccacttcatattccgtctgcgcaggtttacccgtttcgtaacagactttctgtttcgggcggtttggccagtcgcaaatcagcggcagatccaccagaccttccgcaggggatggatgcccccagacgcgggctacatactgctttttcggctcgcgctcgcggaactggcgttttaactcccgctccgcggctttggtcagcgccactacaatcacgccgctggtagccatatccagacgatgcaccgattctgcctgcggataatcacgctgaatgcgcgtcatcacgctgtctttgtgctcttccagacgccccggcacagacaacaaaccgctcggcttgttaaccaccataatgtggtcatcctgatacaggataaccaaccagggttcctgcggtggattgtagttttccatccccattttcggctccgttactgatgcgttacaacgatcaaacgcagggcatccagacgccagcctgcctgatccaggctttccattacctgctgacggttgctctcaatggcggtcagttcgtcgtcacgaatgttcgggttcactgcgcgcagcgcttccagacgagacagctcggcagacagtttttcgtcggcttcgttacgtgcggcatcaatcaatgcacgggcagatttctcgatctgcgcttcacccagctgaaggatagcgtgaacatcctgctgcacggcgttaaccagtttgctgccggtgtgacggttaaccgcgttaagctgacggttaaaggtttcaaactctacctgcgccgccaggttgttgccgtttttatccagcagcatacgtaccggcgtcggtggcaggaagcggttgagctgcaactgcttcggagcctgggcttcaacgacataaatcagttccaccaacagcgtacctaccggcaacgctttgtttttcaatagtgaaatcgtgctgctaccagtatcgccagaaaggatcagatccagaccgttgcggatcagcggatgctcccaggtaataaactgtgcatcttcacgcgccagcgccacttcacgatcaaaggtgatggtgatgccatcttccgacaggccagggaagtccggcaccagcatatgatcggacggcgtcagcacgatcatgttgtcgccgcgatcgtcctgattgataccgataatatcgaacaggttcatggcgaaggcgatcaggttggtatcgtcatcctgctcttcaatgctttctgccagtgcctgggctttttcgccaccgttggagtggatttccagcaggcggtcacgaccctgttccagctgtgctttcagcgcttcatgttgctcgcggcagtttttgatcagatcgtcaaagccttcggtttgaaccggtgaagccagatagttaatcagatcgttgtatacgctatcgtaaatagtgcgtccggtcgggcaggtgtgctcaaatgcatccagaccttcgtgataccagcgcaccagcaccgactgagcggttttctccagataaggcacatggatctgaatatcgtgcgcctggccgatacgatccagacgaccaatacgctgctccagtagatccgggttgaatggcaggtcaaacatcaccatgtggctggcgaactggaagttacgtccttcagaaccgatttctgagcacagcagtacctgtgcgccggtgtcttcttcggcaaaccaggcggcagcgcggtcacgttcgataatcgacataccttcgtggaacaccgcagcgcgaataccttcacgttcgcgcagtacctgctccagttgcagcgcagtggcagctttggcgcagatcaccagcactttctgagagcgatggctggtcaggtagcccatcagccactcaacgcgcggatcgaagttccaccaggtggcgttatcaccttcaaattcctgataaatacgctccgggtagagcatatcgcgagcacgatcttccgcacttttacgtgcgcccataatgccggagactttaatagccgtctgatactgcgtcggcagcggcagcttaatggtgtgcagctcgcgtttcgggaatcctttcacaccgttacgcgtgttacggaacagcacgcggctggtgccgtggcgatccatcagcatcgaaaccagctcctgacgggcgctctgggcatcttcgctgtcgctgtttgctgcctgcaacagcggctcgatatcctgctcgccgatcatctcgccgagcatgttcagttcgtcattgctcagtttgttacctgccagcagcatggcaacggcgtccgcaaccggacgataatttttctgctcttcaacgaactgcgcaaaatcgtggaaacggttcgggtccagcagacgcagacgggcgaagtggctttccatccccagctgttccggggtcgcggtcagcagcagaacgcccggcacgtgctctgccagttgttcaatggcctgatattcacggcttggcgcatcttcgctccacaccaggtgatgcgcttcatcgaccaccagcaggtcccattcggcttcacagagatgttccaggcgctgtttgctacgacgggcaaaatccagcgagcaaatcaccagctgttcggtgtcgaacgggttgtaagcatcgtgctgagcttcggcataacgctcatcatcaaatagcgcaaagcgcaggttgaaacggcgcagcatttctaccagccactgatgctgtaaggtttccgggacgataattagcacacgttcagcagcgccagagagcagttgctgatgcaggatcatcccggcttcaatggttttccctaaacccacttcgtcagccagcaggacgcgcggcgcgtggcggcgaccaacatcatgagcgatgttgagctgatgcgggatcaggctggtacgctgaccgcgcaggccgctgtacggcatacggaactgttcgctggaatacttacgcgcgcgataacgcagcgcaaagcggtccatacggtcaatctgcccggcaaacagacggtcctgcggtttgctgaacaccagtttgctatcaaggaaaacttcacgcagggctacgccggactcttcagtatccaggcgagtaccgatataggtcagcaagccattttcttcttttacttcttcgacttgcatctgccagccgtcatggctggtaatagtatcaccagggttgaacatcacgcgggtcacgggggaatcactgcgtgcgtacagacggttttcaccagtagatgggaaaagtaaagtgacagttcgcgcatccaccgcgacaacggttccaagtcccaattcgctttctgtatcgctgatccagcgttgaccaagtgtaaaaggcatatgtgttcggctctatatctttaattgcaggcaataaccacccgctaccgtgcttatggggtagtggtgttattcaggtccaggaatggaaagggcgctatggtactggatggcaaagcattcgtcacgcatcaaaatggtatctggcgaactctttttttgctcaaaatagcccaagttgcccggtcataagtgtagcaaaattatcctcaataaaagggagtattccctccgccacgggttgtagctggcgggtcagatagtgttcgtaatccagtggtgaacgttggtagtccagcggctccgggccgttggtggtccatacgtacttaatggtgccgcgattctgatattgcaaggggcgaccacgcttttggttttcttcatcggcaaggcgagcggcgcgtacatgaggcggcacattacgctgatactcgctcagcggacggcgaaggcgtttacggtaaaccagtcgcgcatccagttcacccgccatcagtttgtcgatggtttcgcgtacatattcctgatatggctcgttgcggaagatgcgcaggtatagctcctgctgaaactgctgggccagcggcgtccagtcggtgcgcacggtttccagccctttaaacaccatccgctgtttatcgccctcctgaatcagcccggcgtagcgctttttactgccggtatcagctccgcgaatggttggcataagaaaacggcagaaatgagtttcatactccagttctaatgcgctggtcagccgttgtttttgcagcgtttccgcccaccaggcgttaacgtgctgcaccagtgcacgaccgattttcgccgcctcttcttccgaatgtgcaccttttagccagacaaaagtcgagtcggtatctccgtagataacgtcgtagccctgcgcttcaatcaatgctttggtttgccgcatgatctgatgaccacgcatggtgatcgacgatgccaggcgcggatcgaaaaagcggcaggcggtggtgccaagcacgccataaaaggcattcataatgatcttcagcgcctgcgaaagtggtttattaccctgacgtttggcttcatcgcgcccgtgccagatgttagtcacaatctccggcaggcaatgtttctcccgtgagaaccaggcatcgagaaaaccttcggtactgtgctctggatcaggctgcgccatgccttcaaccagcccgacgggatcaatcagaaaggtgcggatgatcgacgggtacaggcttttatagtccagcaccagcactgaatcataaagccctggccgtgaatccatcacgtagccgccagggctggtgtgcggcggcacttcgccgagattaggcgcgacataaccagcgcgatgcattcgcggaaaatagagatgaccaaacgctgccaccgaaccgccgtgccgatccaccggcaggccgttcaccgttgctcgttcgagtaaaaatggcatgatttcagttttgtggaagatctgcgtcaccagctcgcaatctttcaggttataagttgccagcgcaggtttatcttcggcgaaacggcggtcaatttcgtccattcgatcccacgggttatcgatagattttccttcgcctaatagctcctgagcgacagtttccagcgagaatgaagagaaattccagaacgcggatttcagcgcctcgataccgtcgataattagccgacctttagcctgggcaaaaaagacgccgtttttaaagccgtgctcgcgccactccagctcgctattatcgcgcccaagacgcagcggaagacggtaacgctcggcatgtttttgcagcattcgcagatcgaactgcaccacgttccaaccgatgatcacatcaggatcgtagttggcaaaccaggcgttgagtttttccagcaactgcgggcggctggcgacgtattccagttcgaaatcaagcgaggaggcgtcgccattctccggccccagcatataaacgatgcgctgcccgcagccttccaggccgatgcagtacagctcaccgtggcgggtggtttcaatatctatagaaacccacttgagcggcggacgatagtcgggatgcggtttcagacgggcattaacgatagtgccattgtgcatatcaccctcgacccacaccggtgaggtgataaaccgctccatcagatagcgttctggcgggcgcacatcggcctcgtagacggtaacgccaccttcacgcaggcgcttttcgtaattcatcaattggcgatgggcgcgacagtaaaggccatacaccggctggcggtgaaaatcctttaacgccagcggtgtcaggcgaaagccttgtttaccctgcaaaatatgctgagcgcggggaacctgatcggcgggaataaacgccacggactcttgcggtgcaagcgtaacctgcaacggcccgttgtccgtcgccagccagaaggagacttctgtcccttgcggggtgtcccgccagtgtcgggttaagataaaacctgcctgcgccacgctgaaaatccatcaaaaaaccaggcttgagtatagcctggtttcgtttgattggctgtggttttatacagtcattactgcccgtaatatgccttcgcgccatgcttacgcagatagtgtttatccagcagcgtttgctgcatatccggtaactgcggcgctaactgacggcagaatatccccatataagcgacctcttccagcacgatggcgttatgcaccgcatcttcggcatttttgccccatgcaaacgggccgtgggaatggaccagaacgccgggcatttgcgctgcatcgataccctgtttttcaaaggtttctacgatgacgttaccggtttcccactcatattcgccgttgatttctgcgtcggtcattttgcgggtgcagggaatggtgccgtagaaatagtcggcgtgggtggtgccggttgctggaatcgactgacccgactgcgcccagatggtggcgtggcgcgagtgcgtatgcacaatgccgccaatggaggggaatgcctgatagagcagccggtgagttggcgtgtcggaggagggctttttcgtaccttcaaccacttcaccggtttcgatgctaaccacgaccatatcgtcagcggtcatgacgctgtaatcgacgccggaaggtttgatcacaaagacgccgcgctcgcgatcaacggcgctgacgttgccccatgtgagcgtgaccaggttgtgttttggcagcgccaggttggcttctaatacctggcgtttgagatcttctaacatgttgactcctgagaggtcgtttcccctcaccccggccctctccccaaaggggcgagggggaaaacaatgccggatgcgctttgcttatccggcctacaaaatcgcagcgtgtaggccagataagacgcgtcagcgtcgcatcaggcgttacatacctgatgtggctacttagcgacgaaatccgtaatacacttcgttccagcgcagtgcgtctttaaacgctggcaggcgggtgtcgttatcaatcaccgtgatttcaatgtcgtgcatctcggcgaactggcgcatatcgttgaggttcagcgcatggctgaagacggtatggtgcgcgccaccagcgaggatccacgcttcggaagcagttggcagatccggttgcgctttccacagcgcattcgccaccggcagtttcggcagggagtgcggtgttttcaccgtgtcgatacagttaaccagcagacggtaacgatcgccgagatcaatcaggctggcgacaatcgctggaccggtttgggtattgaagatcagtcgggcaggatcgtccttaccaccaataccgagatgctgaacgtcgaggatcggtttctcttctacggcaatcgacgggcagacttccagcatatgggagccgagcaccaggtcattacctttctcgaagtgataggtgtagtcctccataaaggaggtgccgccctgcagaccggttgacatcaccttcatgatgcgaagcagggcggcggttttccagtcgccttcgcccgcaaagccgtaaccctgctgcatcagacgctgtacggccagacctggaagctgtttcagaccgtgcaaatcttcaaaggtggtggtgaacgcgtggaagccaccttgttccaggaaacgcttcatccccagctcaatacgcgccgcttccagcacgttctgtcgtttttcgccgtggatttgtgtggcaggcgtcatggtgtagcagctttcgtactcatcgaccagcgcgttaacatcgccgtcgctgatggagttcaccacctgcaccagatcgccaaccgcccaggtattgacggagaaaccgaacttgatctgtgcggcaactttatcaccatcggtgaccgctacttcacgcatgttatcgccaaaacggcagactttcagatgacgggtatcctgtttagagaccgcctggcgcatccaggagccgatacgctcatgggcttgtttatcctgccagtgaccggtaaccacggcatgttgctgacgcatacgcgcgccaatgaagccgaactcgcgaccgccatgtgcagtctggttcaggttcataaagtccatatcgatactgtcccacggcagcgccgcgttaaactgggtgtggaattgcagcaacggtttgttgagcatggtcaggccgttgatccacattttggccggggagaaggtgtgcagccacaccaccagaccagcgcaacgatcgtcgtaattcgcgtcgcggcaaatagcggtgatttcatccggcgtggtgcccagcggtttcaacaccagtttgcagggcagtttcgcttccgtattcagcgcattaacaacgtgctcggcatgttgggtgacctgacgcagggtttccgggccatacagatgctggctgccaatgacaaaccacacttcataattatcaaaaatcgtcattatcgtgtccttatagagtcgcaacggcctgggcagcctgtgccggggcggaagttggaagatagtgttgttcggcgctcatcgcccattgctgatagcggcgataaagctgttcaaagcgttgtgcctgttcgctgcgcggttgcagggttttctctaccgcactggccattttttgctgggctgatgggatgtctgcgtgcactttcgcggcgacggcagcaaaaatcgccgcaccgagcgcacagcactggtcagaggcaacaatttgcagcgggcgattcagcacgtcgcagcaggcctgcataatgacctggtttttccgcgcgatgccgcccagcgccatcacgttattgacggcgatcccctgatcggtaaagcactccatgattgcgcgtgcgccaaaggcggtggcagcaatcaaaccgccgaacagcagcggagcgttggtagcgaggttaagatcggtaatcacccctttcagacgttggttagcgtttggcgtgcgacgaccgttaaaccagtcgagcaccaccggcaggtgatccagagacggatttttggcccatgcttcggtcagcgccggaagcagttgtttctggctggcgttgatttgcgctttcagttccggatgctgggcggcaagctgttccagcggccagccgagtacgcgaccaaaccaggcgtagatatcaccaaacgccgattggcctgcttccagaccgataaatccaggcaccacgctgccatcaacctgaccgcaaatacctttaactgcccgctcgccaacgctctgtttgtcggcaatcagaatgtcgcaggtggaagtaccgataacttttaccagtgcgttaggctgtgcgcctgcgccaactgcgcccatatggcagtcaaacgcgccgccggaaatcaccacgctttcaggcaggccgagacgctgcgcccattccgggcataaggtgcccaccggaatatcggcagtccaggtgtcagtgaacagcggggaaggcaaatggcgattgaggatcgggtccagctcatcaaagaaactggctggcggcaagccgccccagctttcgtgccacagagatttatgcccggcgctgcaacgtccgcgacgaatatcctgcgggcgggtggtaccggaaagcagagctggcacccagtcgcacagctcaatccacgatgcggcagattgcgccacggcgctgtcctggcgagtcacatgcaggatttttgcccagaaccattcgctggaataaataccgccaatatagcgggagtagtcaacgttgcccggcgcgtggcacaaacgggtaatctcttccgcttcttcaaccgcagtgtggtctttccacaatacgaacatcgcgtttgggttttcggcaaactctgggcgcagcgccagcacgttaccgtcggcgtcaatcggtgcgggcgtcgagccggttgtgtcaacgccaatcccgaccacagctgcgcgctgttcggcgctaagctctgcaagcacgattttcagcgccgcttccattgactcaatgtagtcacgcggatgatggcggaactggttattcggggcatcacaaaattgccctttctgccaacggggataccactctacgctggtggcgatctcttcaccggtagcgcattccaccgccaaagctcgcacagaatcactgccaaaatcgaggccaattgcaatcgccatcgtttcactccatccaaaaaaacgggtatggagaaacagtagagagttgcgaaaaaaagcgtcaggtaggatccgctaatcttatggataaaaatgctatggcatagcaaagtgtgacgccgtgcaaataatcaatgtggacttttctgccgtgattatagacacttttgttacgcgtttttgtcatggctttggtcccgctttgttacagaatgcttttaataagcggggttaccggttgggttagcgagaagagccagtaaaagacgcagtgacggcaatgtctgatgcaatatggacaattggtttcttctctgaatggcgggagtatgaaaagtatggctgaagcgcaaaatgatcccctgctgccgggatactcgtttaacgcccatctggtggcgggtttaacgccgattgaggccaacggttatctcgatttttttatcgaccgaccgctgggaatgaaaggttatattctcaatctcaccattcgcggtcagggggtggtgaaaaatcaggggcgagaatttgtctgccgaccgggtgatattttgctgttcccgccaggagagattcatcactacggtcgtcatccggaggctcgcgaatggtatcaccagtgggtttactttcgtccgcgcgcctactggcatgaatggcttaactggccgccaatatttgccaatacgggtttctttcgcccagatgaagcgcaccagccgcatttcagcgacctgtttgggcaaatcattaacgccgggcaaggggaagggcgctattcggagctgctggcgataaatctgcttgagcaattgttactgcggcgcatggaagcgattaacgagtcgctccatccaccgatggataatcgtgtacgcgaggcttgtcagtacatcagcgatcacctggcagacagcaattttgatatcgccagcgtcgcacagcatgtttgcttgtcgccgtcgcgtctgtcacatcttttccgccagcagttagggattagcgtcttaagctggcgcgaggaccaacgcattagtcaggcgaagctgcttttgagcactacccggatgcctatcgccaccgtcggtcgcaatgttggttttgacgatcaactctatttctcgcgggtatttaaaaaatgcaccggggccagcccgagcgagttccgtgccggttgtgaagaaaaagtgaatgatgtagccgtcaagttgtcataattggtaacgaatcagacaattgacggcttgacggagtagcatagggtttgcagaatccctgcttcgtccatttgacaggcacattatgcaagcattgctggaacactttattacccaatccaccgtgtattcattgatggcggtggtgttggtggcctttctggagtcgctggcgctggtcggtttgattctacccggtacggtgctgatggcggggctgggagcgctgattggcagcggcgagttaagtttctggcacgcgtggatggcggggattgtcggttgcctgctgggcgactggatctccttctggctgggctggcgttttaaaaagccgttgcatcgctggtcatttctgaagaaaaacaaagcactacttgataaaactgaacatgcgttgcatcaacacagcatgttcaccattctggtcggtcgttttgttggcccgacgcgtccgctggtgccaatggtggcgggaatgctggatctgccagtggcaaaatttatcacgccgaatattatcggctgcctgctgtggccgccgttttacttcctgccagggattctggcgggcgcggcgatcgatattcctgccgggatgcagagcggtgagtttaaatggttgctgctggcgacggcggtatttttgtgggttggtggctggctgtgctggcggttatggcgcagtggtaaagcgactgaccgtttgagtcattatttgtcccgcggtcgtttgttgtggctgacgccgttgatttctgccatcggcgtggtggcgctggtggtgttaattcgccacccgttgatgccggtgtatatcgatattttgcgtaaagtggttggggtttaggggatagtttgcatcggcgctggtttgttcccttctccccagaggggcgaggggactgtccgtgcgcttttaacctgtaattcccaacagcgccgaagcactcgccttaccgcttaacaattcatcggttttaccctgccaggcgatgcgcccgtcggcgaccaccaccgagcgcgtggcgatccgcgcggcatcttccacactgtgcgacaccatcaataacgtcattttttgctgctggcagctcgtgctcaccagcgtcaacatctcctggcgtagcgccggatcgagcgcagagaacggttcatcgagcaataaaatcggctgctcgcgtaccagacaacgcgctaacgccacgcgctgtcgctgaccgccggaaagctcgcccggtaaccgcgccattaaattatcaatccccatctggcgggcgatagcgtgcattttctcctgctgcgccgcgttcagcttcaatcccggattaagccccagcccgatgttctgcgcgaccgtcaggtggctgaacaggttgttctcctgaaacagcatcgataccggacggcgtgacggcggcgtcgtggtgtgatcaacgctgtcgatagtcagcgaaccgctggctggcgtcagaaaaccggcaatcaaattcagcagggtacttttacctgcgccgcttggcccgaggatcgccacctgctcgccgcgttctaccgttaagctaaaacgcatcggcaaatggtggtaaagccaggtgatatcagtcagttttaacatttcgccccggtagtttttcaatcacggtaaacagcagaaaacagagtagtagcagaattaacgcggtgaccgcgccgtcctggctgcgataggagccaatttgctggtagagataaaacggcagggtgcggaaatcatcgttaccgaacaacgccaccacgccaaaatcaccaatcgacagcacgcatgcaaaggccagcgcctgcgccagtgggcgtttcagggcgcgcagctccaccacgtttaagcgtgaccagccttcaatgcccaacgactgacacaacatgctgtagcgggcggtgatatcgcgcatcgggttttccagtactttcagcgcgtaagggatcgccattaacgcattggtgaaaatcacaatgccgtcagcagattgtggcaggccgatagtgttgttgagcagtaaaaagaagccggtagccagcacaatccccggcatggcgaggatcaacatgccgctcatctccagcgcctgacccgccagcattttctgccgcgcccgaagttcgcgactgctccatagcagcatcatggtcagcactacgcacaatacacctgccgccagcgcaatacgcaacgaggtccacagcgcctgccacagcaccgattgtgccagcacttccggcaactggcgatttaccccatcgacgatcaccgccagcaacggtggcaacaacagcagcagcgccagcactattaacaccgtgtcgcaaatgcggctatgcagacgatcgtccgggtcgcgccagccttgcagcagcgtggtgccgggcgcaatggccttactcaatcgctgactcaacagcaccagcccaaggcaacacatcatctggatcagcgccagcatcgccgcgcgggcaggatcgtagtcgtaactcagcgcctgataaatagccagctcgatagtggtcgcttgcggaccgccgcctagcgacagtacggtggcgaagctggcgaaacagagcataaagataagcgcagcaactggcgggatttgtcgccgtaaccacggccattcgacgaaacgaaagaagtgccagccacgcattccaagctgggcggcaagttgacgttgttcgccgggaatgttttccagtgcctgaagtaataaacggctcgccatcggcagattaaaaaacacatgggccagcaaaatgccttgcaggccgtagggcgaaaaggtccactccagaccgagcgattggcagagcgatgccagccagccctgacgaccatagacgctaagaatgccgaaaacagcaaccagcaccgggaggatcaaggtcattgcgcacagacgcaacagcgccagccgacccggaaagcgcctgcgatagagggcgcgggcgaggaatatcgcgggtacgacagagagtagcgccgagagaaacgcctgccagaaggagaagcgcaccacatgccacaggtagctgtcctgccagactgctacccagttaccctgcggcgcgttccaccacagggcgagaaacgccgcgagcgcaaccgctaccaccagcgtggcggcgcttacacctggaattaaccagccgggaattaacggctgacggcgcgttgccattcgctaatccatgcctgacgttgtgccgccacttcggctggcgtgaactccagcgtggttgctggtttggtcaattgttcaaaaccggcaggctgcgtgacgtttgccaccggatacatccagttgccggttgggatcgcattctgaaaagccggataaaccataaactggaggaatttttgcgccagctccggctgcttgctggcagcggtgcgggcggcgacttccacctgcagatagtgaccttcgctgaagttcgcggcggcgtagttatctttcttctcttcgagaatgtgataagccggagaggtggtgtaactcagtaccagatcgctttcgccttttaaaaacaggccataggcttcgctccagcctttggtgaccgtgacagttttcttcgccagtttctgccaggcttgtggggcgtcatcgccatagactttttgcatccacaacagcagacccagccccggcgtgctggtacgcggatcctgataaatcacccgccagttctgatcgctctcaaccaattctttcaggctttgcggcgggtttttcagtttgttcttgtcatagacgaaggtgaaatagccgtaatcaaacgggacgaaagtgtcattattccagccgccgggaacgttaacggcatccgctgccacaccgcttttggcaaatagtccggttttactggcggcgtctaacagattgttatccagccccagcaccacatcggctttactatttttgccttccatccgtagacggttgagaagcgaaacgccatcttccagcgccaccagtttcagttcgcagttacagtcggcttcaaaagcttttttgatctttggaccaggcccccagtcggcggcgaaggaatcgtaggtataaacagtcagaacgggtttagcgaaaacgggcgctgtgcacagcaacagcaggggaagacatttttttaacactttgcacctcaaaaaagagtggcaaaggacttgagaaggagcctcaaatcccttcgtcggcgttatccggatcaggttcgacgggtattttctcagcgcacgcgtttgcgtggcaccccgttgagaacggcgttagtgtagtgattttgttatctaccagcaatcatggatccggtggcgcaaaccacgctgatttaaaatcgaaccagccgagggtgttcatgcgcaggccgcgcatactgcgttgcccctgaatgatcagccagtggtggataagcggcaccattgctttgctggcgaccagttgctggcaccagttcgccaggttcatttcgccattgcgccagcgggcggcgtcggcttgccagtcgatcggaatacagtgttggagcagcggcacctcgcacaagtgcgcgaacagcgaaaaatccagcggcagcgtaaagttggcgctgttaagccagatatcgctctcgatctctccttcatgccactgatcgtagctgatctctttgatttccagcgtgacctggtgacttgccagaatctgctgcatgatcccggcaatcacccgatgctcactgtgatcctgataaaaggtcagggtgaggctttccaggccagccggtttttcgctctttatggtgcgggcatggtgccaacgggggagcagtccataagccgggaaccacagttgctggtactgttcctcagcgaaatagaccagattagttggagaaagcacatagcttacccagtccctgacttgctgattcgccccgcgatgggtgcggctgtcgaatagtaaatagtagcaaccttcctccaggcggctttcaatctctttttcctcaccctgtggaccttttagcatcagacctccagctggctcgtcggcaatttccggcagaacccagacgttaacttcatcgattaatgcccggtaaccgaagaagtcatcgaatgcctgaattttcagttgattggtggtgttgcggatcaccgcatacggaccggtgccgatgggatggctggcaaagttactgagggtttcccattcgcgcggcaggatcatcgccggaacttgccccagcagtaacggtaaccagcggtccggttgcgtgagatggatatccagcgtccagggcgtcggcgacacaatgtccgcaatatgcgaatagagcggcagcgtattgattcgttttaaagaggcgatcacgtcgtccatttccagttcacgaccatgatgaaaatggactcctggacgcaaaaagaaacgccagtgaagcggtgatatttgctgccagtggtgggcgatgtctgcttccagttccccattttcctcatttatgcgcgttagggaactgaagatttgccgggcaatatgggtttcggaacggcgcaatgcgctgccaggtagcagattacgcaacggacgatagtagagcacgcgcaggatgtgccgcccctggcggaagctgcggcccagatgagaaaccagcatttgccgcacagtcgctttgtcgccaaccaactgcactagttggtcgatacgatcctgctccagcaggtcttccgcccgctgttgctgaagcgccagcccggtatagaggaatgtcagacgcgagcgtttaccgcgcccgacttccgcttcccacgtcagccagccgcgatcctgcatggtgttgagcagggtacgcatatgacgacgcgagcagctcaataacgctgccagttcgttgagcgttgtgtcctgcgatttaccctcgcagcattgccacaggcggatgaactgttgttgcagacgagcagatggcataaaaggggaactcctgcgcaaaagacagcaattttattttccctatattaagtcaataattcctaacgatgaagcaaggaggtgccccatgcgtcagttttatcagcactattttaccgcgacagcgaagttgtgctggttgcgttggttaagcgtcccacaacgattaaccatgcttgaaggactgatgcagtgggatgaccgcaattctgaaagttgacttgcctgcatcatgtgtgactgagtattggtgtaaaatcacccgccagcagattatacctgctggttttttttattctcgccgcgctaaaaagggaacgtatgatctggataatgacgatggctcgccgtatgaacggtgtttacgcggcatttatgctggtcgcttttatgatgggggtggccggggcgctacaggctcctacattgagcttatttctgagtcgtgaggttggcgcgcaacctttctggatcggactcttttatacggtgaatgctattgctgggatcggcgtaagcctctggttggcaaaacgttctgacagtcagggcgatcggcgaaaactgattatattttgctgtttgatggctatcggcaatgcgctattgtttgcatttaatcgtcattatctgacgcttatcacctgtggtgtgcttctggcatctctggccaatacggcaatgccacagttatttgctctggcgcgggaatatgcggataactcggcgcgagaagtggtgatgtttagctcggtgatgcgtgcgcagctttctctggcatgggttatcggtccaccgttggcctttatgctggcgttgaattacggctttacggtgatgttttcgattgccgccgggatattcacactcagtctggtattgattgcatttatgcttccgtctgtggcgcgggtagaactgccgtcggaaaatgctttatcaatgcaaggtggctggcaggatagtaacgtacggatgttatttgtcgcctcgacgttaatgtggacctgcaacaccatgtacattattgatatgccgttgtggatcagtagcgagttaggattgccagacaaactggcgggtttcctgatggggacggcagctggactggaaataccagcaatgattctggctggctactatgtcaaacgttatggtaagcggcgaatgatggtcatagcagtggcggcaggagtactgttttacaccggattgattttctttcatagccgtatggcgttgatgacgctgcaactttttaacgctgtatttatcggcattgttgcgggtattgggatgctatggtttcaggatttaatgcctggaagagcgggggcagctaccaccttatttactaacagtatttctaccggggtaattctggctggcgttattcagggagcaattgcacaaagttgggggcactttgctgtctaggtgatgctgccaacttactgatttagtgtatgatggtgtttttgaggtgctccagtggcttctgtttctatcagctgtccctcctgttcagctactgacggggtggtgcgtaacggcaaaagcactgccggacatcagcgctatctctgctctcactgccgtaaaacatggcaaatgcagttcacttacaccgcttctcaacccggtacgcaccagaaaatcattgatatggccatgaatggcgttggatgccgggcaactgcacgcattatgggcgttggcctcaacacgattttacgtcacttaaaaaactcaggccgcagtcggtaacctcgcgcatacagccgggcagtgacgtcatcgtctgcgcggaaatggacgaacagtggggctatgtcggggctaaatcgcgccagcgctggctgttttacgcgtatgacagtctccggaagacggttgttgcgcacgtattcggtgaacgcactatggcgacgctggggcgtcttatgagcctgctgtcaccctttgacgtggtgatatggatgacggatggctggccgctgtatgaatcccgcctgaagggaaagctgcacgtaatcagcaagcgatatacgcagcgaattgagcggcataacctgaatctgaggcagcacctggcacggctgggacggaagtcgctgtcgttctcaaaatcggtggagctgcatgacaaagtcatcgggcattatctgaacataaaacactatcaataagttggagtcattaccgctgtctactgggtaattgcggttatttctgttgtcgcattatttttaaccgcaaaggttaaagacgtttgatgacgtggacgatagcggaaagcccggtcatttgaccgggcaaggggattaattcataaacgcaggttgttttgcttcataagcggcaatggcgtcgtcgtgctgcaaggtaagcccaatactgtccagaccgttcatcatgcagtggcggcggaaggcatcgatggtaaagcgataggttttctctcccgctttcacctcttgcgcttccagatccacgtcgaaatggatccccggattggctttcaccagcgcaaacagttcgtccacttctgcatcgcttaatttcaccggcagcagctggttgttaaagctattgccgtagaagatgtcagcaaaactcggcgcaatcaccactttaaagccgtagtcggtcaatgcccagggcgcgtgctcacgcgaggagccacagccgaagttttctcgtgccagcaaaatggaagcgccctgatactgcgggaagttcagcacgaagtccgggtttggctgttggcctttttcatcgagaaaacgccagtcgttaaacagatgcgcgccaaaacccgtacgggtcactttctgcaaaaactgtttcgggatgattgcatcggtatcgacattggcggcatccagcggaaccaccaggcctgtgtgtttgataaatttctctgccatggtgtgctccttatttaatgttgcgaatgtcggcgaaatgtccggtcacagcagcagcggcagccattgccgggctgaccagatgcgtgcgcccgccgcgcccctggcggccttcaaagttacggttgctggtggatgcacaacgttcgcccggattcagacggtcgttgttcatcgccagacacattgagcagccaggcaagcgccattcaaaaccggcttcaataaagattttatccagaccttccgcttccgcctgggcttttaccgggccagagccgggaaccaccagtgcctgcacgcctggcgcgacttttcgccctttggcgatctccgctgccgcgcgtaaatcttcaatgcgcgagttggtacaggaaccgataaacactttgtcgatagccacttcggtcagcggaatgcccggtttcagccccatataggccagcgctttttctgccgacgcgcgtttaaccggatcggcaaacgaagccggatcgggaatattgtcgttcacggaaatcacctggcctggattggtgccccaggtgacctgcggtgaaatttcttctgcttgcagagtgacaacggtatcgaaagttgcgccttcgtcggtttgcagggttttccagtaggcaacggcgtcgtcgaaatctttgcctttcggcgcatgcaaacggcctttgacatagttaaaggtggtttcgtccggtgcaaccagaccggcttttgcgcccatttcgattgccatattgcacagggtcatacgaccttccatgcttaaatcacggattgcttcgccgcaaaactccaccacatgcccggtgccgcctgcgctaccggttttaccgataattgccagcacgatatcttttgcggtaatgcccggcgcggctttgccctggacttcaattttcatggtttttgcgcggccctgtttcagggtttgcgttgccagtacgtgttcaacttcggaagtgccgataccaaaggccagtgcgccaaacgcgccgtgggtggcggtatgcgagtcgccgcagacaatggtcatccccggcaaggtgacgccctgttccggccccattacgtggacgatcccctgatacgggtgattcaggtcatacagttcgacgccaaattctttgcagtttttaatcagctcctgcatctggatgcgcgccatttcaccacaggcattaatgtctttcgtctgggtagagacgttgtgatccatagtggcgaaggttttgcccggctgacgtaccgggcgaccgtgggcgcgcagaccatcgaacgcctgcggtgaggtcacttcatgcaccaggtggcggtcgatatataacagcggggtttcgttttcggcttcgtacactacgtgagcgtcgaataatttttcgtataacgttttagccatgattacaccccttctgccacatagcgggcaatgatatcgcccatttcatcggtactaacggcggcagcgccacgggctaaatccccggtgcgaatgccttcttctaatgcgcggttaatggcgcgttcaatggcgcaagccgcatcatcggcatccaggctgtagcgcagcagcagtgccagcgacagaatttgcgcaatcgggttggcgatgtttttgcctgcgatatctggtgctgagccgcctgccggttcatacagaccaaaaccttgctcgttcaggctggcggaaggcaacatccccatcgagccagtgatcattgcgcactcgtcagacagaatgtcgccaaacaggttggagcacagcagaacgtcaaactgtgatggatctttaatcagctgcatggtggcgttgtcgatgtacatatgcgccagttcgacatccgggtattccgtggcgatctcgttgacgatttcacgccataaaatagaggattgcagcacgttagctttgtcgattgaggtgactttgtggcgacgtttacgagcagattcaaacgcgatgcgggcaatacgctcgatctcaaaacggtgatacacctcggtatcaaacgctttttcatattgtccgctaccttcgcggccttttggctgaccgaaatagatgccgccggtcagttcgcgcacgcacaggatgtcgaagccgttagcggcaatgtctgcacgcagcggacagaatgcttccagcccctgatacagttttgccgggcgcaggttgctgaataatttgaagcgcttacgcagaggcagcagcgcgccgcgttctggttgctggtctggtggtaaatgttcccacttcgggccgcctaccgagccaaacagcacggcatcggcttgctcacaaccttcaaccgtcgcaggcggcagtggttgcccgtggttatcaatggctgcgccgcctacatcgtaatggctggtggtgatgcgcatcgcaaagcggttgcgcacggcattcagcactttcagcgcctgggtcatcacttccggaccaataccgtcccccggcaatacggcaatatggtaattcttcgacatcacacggtttccttgttgttttcgttgtgttgagctttgcgttgcaactctttttcgacttctgcggcacgccagatattgttcagtacgtgcaccatggctttggcggaggactcgacaatatcggtggccaggccgacgccgtggaagcggcgaccgttgtagttggcgacaatatccacctgacccagcgcatctttaccgtgacctttggcggtcaggctgtatttcaccagttcgacgttatagtcagtgatgcggttaattgcctgatagacggcatcgaccggaccgttaccgttggcggcttctgctttgacttcttcgccacaggccagtttgacggcggcggtggcgatatcgttagagccagactgcacgctgaagtaatccagacggaaatgctccggctcttcttgctgcttaccgatgaaggccagcgcctccagatcgtaatcaaacacctgaccttttttgtccgccagcttcaggaaagcatcgtacaaattgtctaaattatattcactttctttataccccatctcatccatgcgatgtttcaccgccgcacgccccgaacgagaggtcagattcagctggatttggttcagaccaatagattctggtgtcatgatttcgtagttttcgcggtttttcagcacgccatcctggtggataccggaggagtgagcgaatgcgctgctgccaacaatggctttgtttgccgggatcggcatattacaaatctggctaactaactggctggtgcgccatatctcctggtgattaatggcggtgtggacgttgagaatatccttacgaactttaatcgccatgatgacttcttccagcgaacagttaccggcacgctcgccgatcccgttcattgcaccttccacctggcgtgcaccggcatgtaccgccgccagtgagttgccgaccgccaggcctaaatcgtcgtgggtatgtacggaaataatggctttgtcgatgttaggtacgcgttcatacaggccgctgatgattccggcgaactcaagcggcatggtgtagcccacggtgtccggaatgttgatggtggtggcaccggcattaatcgccgcttcgaccactcgcgccagatcggcaatgggtgtacgcccggcatcttcgcaagaaaattcaacatcatcggtgtaattacgggcgcgtttcaccatatagatagcgcgttcgatcacctcgtccagggtgctgcgcagcttggtggcgatgtgcattggggaggtagcaataaaggtatgaatacggaaggcttcggcgactttcagggattcggccgccacgtcgatatctttttccacgcagcgagctaacgcacatacgcggctgtttttaacctggcgggcgatggtttgcaccgattcaaaatcgcccggcgaagagacggggaaaccgacttccatcacgtcaacacccatacgctcaagggccagcgcaatttgcagtttttctttcacactcaagcttgcctgtaacgcctgttcaccgtcgcgcaatgtggtatcgaaaataatgacttgctggctcatggtttaggtccttgtctcttttagagcgcctcgcttcgggcataaaaaaacccgcgcaatggcgcgggttttttgtttgactgcgtgctggcttaatgctggatgccgctcactcgtctaccgcgcaaagaagatgcgtttagtagtagtagaccgataaagcgaacgatgtgagtcattaaatcagctccagatgaatgcgatatgcttttagagttactggatacaaaaacggatgtcaaccctgacgcaataaaaacgtcccgccagcgtgagttctgcatccgtaaaattagctaattgtgctgcggtggttaaagtaagcgatattaatttctgcttaactaccgacgcttttcatcggttgacatatttcagcataaatttttgcatctaatcaacgaggaaaaaggggacaaaatgcacgcgttgcaaaacctatcctgatgatttgtattgaattatatgttttgcgattttttttgatattgatttggtgaatattattgatcaattaatgttaagaattaatgcattaaatatataaattaattattaaataagcacatttaatccattttgtagatgattgagtattcgcggtagttatgattagattgttttcgcaacaaaaacattatggattcttatgctgtggtaaatgactcattccacggcaatggattctgtttttatcagaacccgtatctttatgttttccgaattttactcattttgctttttcttattttatatgcatgataaatcatattcttcaggattatttctctgcattccaataagggaaagggagttaagtgtgacagtggagttaagtatgccagaggtacaaacagatcattcagagacggcggagttaagcaagccacagctacgcatggtcgatctcaacttattaaccgttttcgatgccgtgatgcaggagcaaaacattacccgtgccgctcatgttctgggtatgtcgcaacctgcggtcagtaacgctgttgcacgcctgaaggtgatgtttaatgacgagctttttgttcgttatggccgtggtattcaaccgactgctcgcgcatttcaactttttggctcagttcgtcaggcattgcaactagtacaaaatgaattgcctggttcaggttttgaacccgcgagcagtgaacgtgtatttcatctttgtgtttgcagcccgttagacagcattctgacctcgcagatttataatcacattgagcagattgcgccaaatatacatgttatgttcaagtcttcattaaatcagaacactgaacatcagctgcgttatcaggaaacggagtttgtgattagttatgaagacttccatcgtcctgaatttaccagcgtgccattatttaaagatgaaatggtgctggtagccagcaaaaatcatccaacaattaagggcccgttactgaaacatgatgtttataacgaacaacatgcggcggtttcgctcgatcgtttcgcgtcatttagtcaaccttggtatgacacggtagataagcaagccagtatcgcgtatcagggcatggcaatgatgagcgtacttagcgtggtgtcgcaaacgcatttggtcgctattgcgccgcgttggctggctgaagagttcgctgaatccttagaattacaggtattaccgctgccgttaaaacaaaatagcagaacctgttatctctcctggcatgaagctgccgggcgcgataaaggccatcagtggatggaagagcaattagtctcaatttgcaaacgctaactgaatgcagaataggtcagacatgaatgtctggtttattctgtattttttattgaatgtagaattttattctgaatgtgtgggctctctattttaggattaattaaaaaaatagagaaattgctgtaagttgtgggattcagccgatttattatcaatttaatccttcgtaatggaggattttatcgtttcttttcacctttcctcctgtttattcttattaccctgcgtttatgtctctggctgccaattgcttaagcaagatcggacggttaatgtgttttacacattttttccgtcaaacagtgaggcaggccatggagatgttgtctggagccgagatggtcgtccgatcgcttatcgatcagggcgttaaacaagtattcggttatcccggaggcgcagtccttgatatttacgatgcattgcataccgtgggtggtatcgatcatgttttagttcgtcatgagcaggcggcagtgcatatggccgatggtctggcgcgcgcgaccggggaagtcggcgtcgtgctggtaacgtcgggtccaggggcgaccaatgcgattactggcatcgccaccgcttatatggattccattccattagttgtcctttccgggcaggtagcgacctcgttgataggttacgatgcctttcaggagtgcgacatggtggggatttcgcgaccagtggttaaacacagttttctggttaagcaaacggaagacattccgcaggtgctgaaaaaggctttctggctggcggcaagtggtcgtcctggaccagtagtcgttgatttaccgaaagatattcttaatccggcgaacaaattaccctatgtctggccggagtcggtcagtatgcgttcttacaatcccactactaccggacataaagggcaaattaagcgcgctctgcaaacgctggtagcggcaaaaaaaccggttgtctacgtaggcggtggggcaatcacggcgggctgccatcagcagttgaaagaaacggtggaggcgttgaatctgcccgttgtttcctcattgatggggctgggagcgtttccggcaacgcatcgtcaggcactgggcatgctgggaatgcacggtacctacgaagccaatatgacgatgcataacgcggatgtgattttcgccgtcggggtacgatttgatgaccgaacgacgaacaatctggcaaagtactgcccaaatgccactgttctgcatatcgatattgatcctacttccatttctaaaaccgtgactgcggatatcccgattgtgggggatgctcgccaggtcctcgaacaaatgcttgaactcttgtcgcaagaatccgcccatcaaccactggatgagatccgcgactggtggcagcaaattgaacagtggcgcgctcgtcagtgcctgaaatatgacactcacagtgaaaagattaaaccgcaggcggtgatcgagactctttggcggttgacgaagggagacgcttacgtgacgtccgatgtcgggcagcaccagatgtttgctgcactttattatccattcgacaaaccgcgtcgctggatcaattccggtggcctcggcacgatgggttttggtttacctgcggcactgggcgtcaaaatggcgttgccagaagaaaccgtggtttgcgtcactggcgacggcagtattcagatgaacatccaggaactgtctaccgcgttgcaatacgagttgcccgtactggtggtgaatctcaataaccgctatctggggatggtgaagcagtggcaggacatgatctattccggccgtcattcacaatcttatatgcaatcgctacccgatttcgtccgtctggcggaagcctatggtcacgtcgggatccagatttctcatccgcatgagctggaaagcaaacttagcgaggcgctggaacaggtgcacaataatcgcctggtgtttgttgatgttaccgtcgatggcagcgagcacgtctacccgatgcagattcgcgggggcggaatggatgaaatgtggttaagcaaaacggagagaacctgattatgcgccggatattatcagtcttactcgaaaatgaatcaggcgcgttatcccgcgtgattggccttttttcccagcgtggctacaacattgaaagcctgaccgttgcgtcaaccgatgatccgacattatcgcgtatgaccatccagaccgtgggcgatgaaaaagtacttgagcagatcgaaaagcaattacacaagctggtcgatgtcttgcgcgtgagtgagttggggcagggcgcgcatgttgagcgggaaatcatgctggtgaaaattcaggccagcggttacgggcgtgacgaagtgaaacgtaatacggaaatattccgtgggcaaattatcgatgtcacaccctcgctttataccgttcaattagcaggcaccagcgataagcttgatgcatttttagcatcgattcgcgaggtggcgaaaattgtggaagttgctcgttctggtgtggtcggactttcgcgcggcgataaaataatgcgttgagaatgatctgaatgcgcaatttgcagcccaacatgtcacgttgggctttttttgcgaaatcagtgggaacctggaataaaagcagttgccgcagttaattttatgcgcttagatgttaatgaatttaacccataccagtacaatggctatggtttttacattttacgcaaggggcaattgtgaaactggatgaaatcgctcggctggcgggagtgtcgcggaccactgcaagctatgttattaacggcaaagcgaagcaataccgtgtgagcgacaaaaccgttgaaaaagtcatggctgtggtgcgtgagcacaattaccacccgaacgccgtggcagctgggcttcgtgctggacgcacacgttctattggtcttgtgatccccgatctggagaacaccagctatacccgcatcgctaactatcttgaacgccaggcgcggcaacggggttatcaactgctaattgcctgctcagaagatcagccagacaacgaaatgcgctgtattgagcaccttttacagcgtcaggtcgatgccattattgtttcgacgtcgttgcctcctgagcatcctttttatcaacgctgggctaacgacccgttcccgattgtcgcgctggaccgcgccctcgatcgtgaacacttcaccagcgtggttggtgccgatcaggatgatgccgaaatgctggcggaagagttacgtaagtttcccgccgagacggtgctttatcttggcgcgctgccggagctttctgtcagcttcctgcgtgaacaaggtttccgtactgcctggaaagatgatccgcgcgaagtgcatttcctgtatgccaacagctatgagcgggaggtggctgcccagttattcgaaaaatggctggaaacgcatccgatgccgcaggcgctgttcacaacgtcgtttgcgttgttgcaaggggtgatggatgtcacgctacgtcgcgatggtaaactgccttctgacctggcaattgccacctttggcgataacgaactgctcgacttcttacagtgcccggtgctggcagtggctcaacgtcaccgcgatgtcgcagagcgtgtgctggagattgtcctggcaagcctggacgaaccgcgtaagccaaaacctggtttaacgcgcattaaacgtaatctctatcgccgcggtgtgctcagccgtagctaagccgcgaacaaaaatacgcgccaggtgaatttccctctggcgcgtaggtgatgctgccaacttactgatttagtgtatgatggtgtttttgaggtgctccagtggcttctgtttctatcagctgtccctcctgttcagctactgacggggtggtgcgtaacggcaaaagcactgccggacatcagcgctatctctgctctcactgccgtaaaacatggcaactgcagttcacttacaccgcttctcaacccggtacgcaccagaaaatcattgatatggccatgaatggcgttggatgccgggcaactgcacgcattatgggcgttggcctcaacacgattttacgtcacttaaaaaactcaggccgcagtcggtaacctcgcgcatacagccgggcagtgacgtcatcgtctgcgcggaaatggacgaacagtggggctatgtcggggctaaatcgcgccagcgctggctgttttacgcgtatgacagtctccggaagacggttgttgcgcacgtattcggtgaacgcactatggcgacgctggggcgtcttatgagcctgctgtcaccctttgacgtggtgatatggatgacggatggctggccgctgtatgaatcccgcctgaagggaaagctgcacgtaatcagcaagcgatatacgcagcgaattgagcggcataacctgaatctgaggcagcacctggcacggctgggacggaagtcgctgtcgttctcaaaatcggtggagctgcatgacaaagtcatcgggcattatctgaacataaaacactatcaataagttggagtcattacctggcgcgtagagtacgggaatggacatcaatatccttaaagtaaataagactattcctgactattattgataagttcttttaaacccgcccgttaattaactcaccagctgaaattcacaataattaagtgatatcgacagcgcgtttttgcattattttgttacatgcagagatgaattgccgatttaacaagcacttttctttgcttttgcgcaaacccgctggcatcaagcgccacacagacgcaacagggactgttaaccggggaagatatgtcctaaaatgccgctcgcgtcgcaaactgacactttatatttgctgtggaaaatagtgagtcattttaaaacggtgatgacgatgagggattttttcttacagctattcataacgttaatttgctgcgcacgttggacgtaaaataaacaacgctgatattagccgtaaacatcgggttttttacctcggtatgccttgtgactggcttgacaagcttttcctccgctccgtaaactcctttcagtgggaaattgtggggcaaagtgggaataaggggtgaggctggcatgttccggggagcaacgttagtcaatctcgacagcaaagggcgcttatcagtgcctacccgttaccgggaacagctgcttgagaacgctgtcggtcaaatggtttgcaccattgacattcatcacccgtgcctgctgctttaccccctgcctgaatgggaaattatcgagcaaaaattatcgcgtctgtcgagcatgaacccggttgagcgccgtgtgcagcgcctactgttaggtcatgccagcgaatgtcagatggatggcgcaggtcgattgttaatcgcgccagtactgcggcaacatgccgggctgacaaaagaagtgatgctggttggacagttcaacaagtttgagctgtgggatgaaacaacctggcatcaacaggtcaaggaagatatcgacgcagagcagttggctaccggagacttatcggagcgactgcaggacttgtctctataaaatgatggaaaactataaacatactacggtgctgctggatgaagccgttaatggcctcaatatccgtcctgatggcatctacattgatgggacttttggtcgcggtggtcactcacgtctgatcctctcgcagcttggcgaagaggggcgtttgctggcgatcgatcgcgacccgcaggctatcgccgttgcgaagactattgatgatccgcgcttctccatcatccacggacctttctccgcgctgggcgaatacgttgccgagcgcgatcttatcggcaagatcgacggcattctcctcgatcttggcgtctcttcaccgcaacttgatgatgctgagcgcggcttttcctttatgcgcgatggtccgctggacatgcgtatggacccaacccgtgggcagtcagccgctgaatggctacaaaccgcagaagaagccgatatcgcttgggtattgaaaacctatggtgaagagcgttttgccaaacgcattgcccgcgccattgtcgagcgtaaccgcgaacagccgatgacccgcaccaaagaactggcggaagtcgtggctgttgcaacgccggtgaaagataagtttaaacatcccgcgacccgtaccttccaggcggtgcgcatttgggtaaacagtgaactggaggagatagagcaggcgctaaaaagctcgctcaacgtgctggccccgggtgggcggctttcgatcatcagcttccactcgctggaagaccgtattgtgaaacgttttatgcgtgaaaacagccgcggtccgcaagttccggcagggttaccgatgactgaagagcagctcaaaaaactgggtggccgtcagctgcgagcactaggcaagttaatgccgggcgaagaagaggtggctgagaaccctcgtgcccgtagttcagttctgcgtattgcagagaggacgaatgcatgatcagcagagtgacagaagctctaagcaaagttaaaggatcgatgggaagccacgagcgccatgcattgcctggtgttatcggtgacgatcttttgcgatttgggaagctgccactctgcctgttcatttgcattattttgacggcggtgactgtggtaaccacggcgcaccatacccgtttactgaccgctcagcgcgaacaactggtgctggagcgagatgctttagacattgaatggcgcaacctgatccttgaagagaatgcgctcggcgaccatagccgggtggaaaggatcgccacggaaaagctgcaaatgcagcatgttgatccgtcacaagaaaatatcgtagtgcaaaaataaggataaacgcgacgcatgaaagcagcggcgaaaacgcagaaaccaaaacgtcaggaagaacatgccaactttatcagttggcgttttgcgttgttatgcggctgtattctcctggcgctggcttttctgctcggacgcgtagcgtggttacaagttatctccccggatatgctggtgaaagagggcgacatgcgttctcttcgcgttcagcaagtttccacctcccgcggcatgattactgaccgttctggtcgcccgttagcggtgagcgtgccggtaaaagcgatttgggctgacccgaaagaagtgcatgacgctggcggtatcagcgtcggtgaccgctggaaggcgctggctaacgcgctcaatattccgctggatcagctttcagcccgcattaacgccaacccgaaagggcgctttatttatctggcgcgtcaggtgaaccctgacatggcggactacatcaaaaaactgaaactgccggggattcatctgcgtgaagagtctcgccgttactatccgtccggcgaagtgactgctcacctcatcggctttactaacgtcgatagtcaagggattgagggcgttgagaagagtttcgataaatggcttaccgggcagccgggtgagcgcattgtgcgtaaagaccgctatggtcgcgtaattgaagatatttcttctactgacagccaggcagcgcacaacctggcgctgagtattgatgaacgcctgcaggcgctggtttatcgcgaactgaacaacgcggtggcctttaacaaggctgaatctggtagcgccgtgctggtggatgtcaacaccggtgaagtgctggcgatggctaacagcccgtcatacaaccctaacaatctgagcggcacgccgaaagaggcgatgcgtaaccgtaccatcaccgacgtgtttgaaccgggctcaacggttaaaccgatggtggtaatgaccgcgttgcaacgtggcgtggtgcgggaaaactcggtactcaataccattccttatcgaattaacggccacgaaatcaaagacgtggcacgctacagcgaattaaccctgaccggggtattacagaagtcgagtaacgtcggtgtttccaagctggcgttagcgatgccgtcctcagcgttagtagatacttactcacgttttggactgggaaaagcgaccaatttggggttggtcggagaacgcagtggcttatatcctcaaaaacaacggtggtctgacatagagagggccaccttctctttcggctacgggctaatggtaacaccgttacagttagcgcgagtctacgcaactatcggcagctacggcatttatcgcccactgtcgattaccaaagttgaccccccggttcccggtgaacgtgtcttcccgggatccattgtccgcactgtggtgcatatgatggaaagcgtggcgctaccaggcggcggcggcgtgaaggcggcgattaaaggctatcgtatcgccattaaaaccggtaccgcgaaaaaggtcgggccggacggtcgctacatcaataaatatattgcttataccgcaggcgttgcgcctgcgagtcagccgcgcttcgcgctggttgttgttatcaacgatccgcaggcgggtaaatactacggcggcgccgtttccgcgccggtctttggtgccatcatgggcggcgtattgcgtaccatgaacatcgagccggatgcgctgacaacgggcgataaaaatgaatttgtgattaatcaaggcgaggggacaggtggcagatcgtaatttgcgcgaccttcttgctccgtgggtgccagacgcaccttcgcgagcactgcgagagatgacactcgacagccgtgtggctgcggcgggcgatctctttgtagctgtagtaggtcatcaggcggacgggcgtcgatatatcccgcaggcgatagcgcaaggtgtggctgccattattgcagaggcgaaagcgaaagatgaggcgaccgacggtgaaatccgtgaaatgcacggcgtaccggtcatctatctcagccagctcaatgagcgtttatctgcactggcgggccgcttttaccatgaaccctctgacaatttacgtctcgtaggcgtaacgggcaccaacggcaaaaccacgactacccagctgctggcgcagtggagccaactgcttggcgaaaccagcgcggtaatgggcaccgttggtaacggtctgcttgggaaagtgatcccgacagaaaatactaccggttccgcagtcgatgttcagcatgagctggcggggctggtggagcagggcgcgacgttttgcgcaatggaagtttcctcccacgggctggtacagcaccgtgtggcggcattgaaatttgcggcgtcggtctttaccaacttaagccgcgatcaccttgattatcatggtgatatggaacactacgaagctgcgaaatggctgctttattctgaacatcattgcggtcaggcgattattaacgccgacgatgaagtgggccgccgctggctggcaaaactgccggacgcggttgcggtatcaatggaagatcatattaatccgaactgtcacggacgctggttaaaagcgatcgacgtgaactatcacgacagcggtgcgacgattcgctttagctcaagttggggcgatggcgaaattgaaagccatctgatgggcgcttttaacgtcagcaacctgctgctcgcgctggcgacactgctggcactcggctatccactggctgatctgctgaaaaccgccgcgcgtctgcaaccggtttgcggacgtatggaagtgttcactgcgccaggcaaaccgacggtggtggtggattacgcgcatacgccggatgcactggaaaaagccttacaggcggcgcgcctgcactgtgcgggcaagctgtggtgcgtctttggctgtggtggcgatcgcgataaaggtaagcgtccactgatgggcgcaattgccgaagagtttgctgacgtggcggtggtgacggacgataacccgcgtaccgaagaaccgcgtgccatcatcaacgatattctggcgggaatgttagatgccggacatgccaaagtgatggaaggccgtgctgaagcggtgacttgcgccgttatgcaggctaaagagaatgatgtggtactggtcgcgggcaaaggccatgaagattaccagattgttggcaatcagcgtctggactactccgatcgcgtcacggtggcgcgtctgctgggggtgattgcatgattagcgtaacccttagccaacttaccgacattctcaacggtgaactgcaaggtgcagatatcacccttgatgctgtaaccactgatacccgaaaactgacgccgggctgcctgtttgttgccctgaaaggcgaacgtttcgatgctcatgattttgccgaccaggcgaaagctggcggcgcgggcgcactactggtcagccgtccgctggatatcgacctgccgcagttaatcgtcaaggatacgcgtctggcgtttggtgaactggctgcatgggttcgccagcaagttccggcgcgcgtggttgctctgacaggttcctccggcaaaacctccgttaaagagatgacggcggcgattttaagccagtgcggcaacacgctttatacggcaggcaatctcaacaacgacatcggtgtaccgatgacgttgttgcgcttaacgccggaatacgattacgcagttattgaacttggcgcgaaccatcagggcgaaatagcctggactgtgagtctgactcgcccggaagctgcgctggtcaacaacctggcagcggcgcatctggaaggttttggctcgcttgcgggtgtcgcgaaagcgaaaggtgaaatctttagcggcctgccggaaaacggtatcgccattatgaacgccgacaacaacgactggctgaactggcagagcgtaattggctcacgcaaagtgtggcgtttctcacccaatgccgccaacagcgatttcaccgccaccaatatccatgtgacctcgcacggtacggaatttaccctacaaaccccaaccggtagcgtcgatgttctgctgccgttgccggggcgtcacaatattgcgaatgcgctggcagccgctgcgctctccatgtccgtgggcgcaacgcttaatgctatcaaagcggggctggcaaatctgaaagctgttccaggccgtctgttccccatccaactggcagaaaaccagttgctgctcgacgactcctacaacgccaatgtcggttcaatgaccgccgctgttcaggtactggctgaaatgccgggctaccgcgtgctggtggtgggcgatatggcggaactgggcgctgaaagcgaagcctgccatgtacaggtgggcgaggcggcaaaagctgctggtattgaccgcgtgttaagcgtgggtaaacaaagccatgctatcagcaccgccagcggcgttggcgaacattttgctgataaaactgcgttaattacgcgtcttaaatcactgattgctgagcaacaggtaattacgattttagttaagggttcacgtagtgccgccatggaagaggtagtacgcgctttacaggagaatgggacatgttagtttggctggccgaacatttggtcaaatattattccggctttaacgtcttttcctatctgacgtttcgcgccatcgtcagcctgctgaccgcgctgttcatctcattgtggatgggcccgcgtatgatagctcatttgcaaaaactttcctttggtcaggtggtgcgtaacgacggtcctgaatcacacttcagcaagcgcggtacgccgaccatgggcgggattatgatcctgacggcgattgtgatctccgtactgctgtgggcttacccgtccaatccgtacgtctggtgcgtgttggtggtgctggtaggttacggtgttattggctttgttgatgattatcgcaaagtggtgcgtaaagacaccaaagggttgatcgctcgttggaagtatttctggatgtcggtcattgcgctgggtgtcgccttcgccctgtaccttgccggcaaagacacgcccgcaacgcagctggtggtcccattctttaaagatgtgatgccgcagctggggctgttctacattctgctggcttacttcgtcattgtgggtactggcaacgcggtaaacctgaccgatggtctcgacggcctggcaattatgccgaccgtatttgtcgccggtggttttgcgctggtggcgtgggcgaccggcaatatgaactttgccagctacttgcatataccgtatctgcgacacgcaggggaactggtcattgtctgcacggcgatagtcggggcaggactgggcttcctgtggtttaacacctatccggcgcaggtctttatgggcgatgtaggttcgctggcgttaggtggtgcgttaggcattatcgccgtactgctacgtcaggaattcctgctggtgattatggggggcgtgttcgtggtagaaacgctttctgtcatcctgcaggtcggctcctttaaactgcgcggacaacgtattttccgcatggcaccgattcatcaccactatgaactgaaaggctggccggaaccgcgcgtcattgtgcgtttctggattatttcgctgatgctggttctgattggtctggcaacgctgaaggtacgttaatcatggctgattatcagggtaaaaatgtcgtcattatcggcctgggcctcaccgggctttcctgcgtggactttttcctcgctcgcggtgtgacgccgcgcgttatggatacgcgtatgacaccgcctggcctggataaattacccgaagccgtagaacgccacacgggcagtctgaatgatgaatggctgatggcggcagatctgattgtcgccagtcccggtattgcacaggcgcatccatccttaagcgctgccgctgatgccggaatcgaaatcgttggcgatatcgagctgttctgtcgcgaagcacaagcaccgattgtggcgattaccggttctaacggcaaaagcacggtcaccacgctagtgggtgaaatggcgaaagcggcgggggttaacgttggtgtgggtggcaatattggcctgccagcgttgatgctgcttgatgctgagtgcgaactgtacgtgctggaactgtcgagcttccagctggaaaccacttccagcttacaggcggtggcggcgaccattctgaacgtgactgaagatcatatggaccgctatccgtttggtttgcagcaataccgtgcggcaaaattgcgtatttacgaaaatgcgaaagtttgtgtcgtcaatgctgatgatgccttaacaatgccgattcgcggtgctgatgaacgctgcgtcagctttggcgtcaacatgggtgactatcacctgaatcatcagcagggcgaaacctggctgcgggttaaaggcgagaaagtgctgaatgtgaaagagatgaaactttccgggcagcataactacaccaatgcgctggcagcactggcactggcagacgcagctggtttgccgcgcgccagcagcctgaaagcgttaaccaccttcaccggtctgccgcatcgctttgaagtggtgctggagcacaatggcgtacgctggattaacgattcgaaagccactaacgtcggcagtacggaagcggcgttgaatggcttgcaggtagacggcacgctgcatttgttgctgggcggcgatggtaaatcggcggacttcagtccactggcgcgctatctgaatggcgacaacgtgcgtttgtactgttttggtcgtgacggtgcgcagctggcggcgctacgcccggaagtggcagaacaaaccgaaaccatggaacaagcgatgcgcttgctggctccgcgtgttcagctgggcgatatggttctgctctccccggcctgtgccagccttgatcagttcaagaactttgaacaacgaggcaatgagtttgcccgtctggcgaaggagttaggttgatgcgtttatctctccctcgcctgaaaatgccgcgcctgccaggattcagtatcctggtctggatctccacggcgctaaaaggctgggtgatgggctcgcgggaaaaagataccgacagcctgatcatgtacgatcgcaccttactgtggctgaccttcggccttgcggcgattggctttatcatggtgacctcggcgtcaatgcccatagggcaacgcttaaccaacgatccgttcttcttcgcgaagcgtgatggcgtctatctgatcctggcattcattctggcgatcattacgctgcgtctgccgatggagttctggcaacgctacagtgccacgatgctgctcggatctatcatcctgctgatgatcgtgctggtagtgggtagctcggttaaaggggcatcgcgttggatcgatctcggtttgctgcgtatccagcctgcggagctgacaaaactgtcgctgttttgttatatcgccaactatctggtgcgtaaaggcgacgaagtacgtaataacctgcgcggcttcctgaaaccgatgggcgtgattctggtgttggcagtgttactgctggcacagccagaccttggtacggtggtggtgttgtttgtgactacgctggcgatgttgttcctggcgggagcgaaattgtggcagttcattgccattatcggtatgggcatttcagcggttgtgttgctgatactcgccgaaccgtaccgtatccgccgtgttaccgcattctggaacccgtgggaagatccctttggcagcggctatcagttaacgcaatcgctgatggcgtttggtcgcggcgaactttggggacaaggtttaggtaactcggtacaaaaactggagtatctgccggaagcgcacactgactttattttcgccattatcggcgaagaactggggtatgtcggtgtggtgctggcacttttaatggtattcttcgtcgcttttcgcgcgatgtcgattggccgcaaagcgttagaaattgaccaccgtttttccggttttctcgcctgttctattggcatctggtttagcttccaggcgctggttaacgtaggcgcggcggcggggatgttaccgaccaaaggtctgacattgccgctgatcagttacggtggttcgagcttactgattatgtcgacagccatcatgatgctgttgcgtattgattatgaaacgcgtctggagaaagcgcaggcgtttgtacgaggttcacgatgagtggtcaaggaaagcgattaatggtgatggcaggcggaaccggtggacatgtattcccgggactggcggttgcgcaccatctaatggctcagggttggcaagttcgctggctggggactgccgaccgtatggaagcggacttagtgccaaaacatggcatcgaaattgatttcattcgtatctctggtctgcgtggaaaaggtataaaagcactgatagctgcgccgctgcgtatcttcaacgcctggcgtcaggcgcgggcgattatgaaagcgtacaaacctgacgtggtactcggtatgggcggctatgtatcaggtccaggtggtctggccgcgtggtcgttaggcattccggttgtacttcatgaacaaaacggtattgcgggcttaaccaataaatggctggcgaagattgccaccaaagtgatgcaggcgtttccaggcgctttccctaatgcggaagtggtgggtaacccggtgcgtaccgatgtgctggcgctgccgttgccgcagcaacgtttggctggacgtgaaggtccggttcgtgtgctggtagtgggtggttcccagggcgcacgcattcttaaccagacaatgccgcaggttgctgcgaaactgggtgattcagtcactatctggcatcagagcggtaaaggttcgcaacaatccgttgaacaggcgtatgccgaagcggggcaaccgcagcataaagtgacggaatttattgatgatatggcggcggcgtatgcgtgggcggatgtcgtcgtttgccgctccggtgctttaacggtgagtgaaatcgccgcggcaggactaccggcgttgtttgtgccgtttcaacataaagaccgccagcaatactggaatgcgctaccgctggaaaaagcgggcgcagccaaaattatcgagcagccacagcttagcgtggatgctgtcgccaacaccctggccgggtggtcgcgagaaaccttattaaccatggcagaacgcgcccgcgctgcatccattccggatgccaccgagcgagtggcaaatgaagtgagccgggctgcccgggcgtaattgtagcgatgccttttgcatcgtatgaatttaagaagttaatggcgtaaagaatgaatacacaacaattggcaaaactgcgttccatcgtgcccgaaatgcgtcgcgttcggcacatacattttgtcggcatcggtggtgccggtatgggcggtattgccgaagttctggccaatgaaggttatcagatcagtggttccgatttagcgccaaatccggtcacgcagcagttaatgaatctgggagcgacgatttatttcaaccatcgcccggaaaacgtacgtgatgccagcgtggtcgttgtttccagcgccatttctgccgataacccggaaattgtcgcagctcatgaagcgcgtattccggtgatccgtcgtgccgaaatgctggctgagttaatgcgttttcgtcatggcatcgccattgcaggaacgcacggcaaaacgacaaccaccgcgatggtttccagcatctacgcagaagcggggctcgacccaaccttcgttaacggcgggctggtaaaagcggcgggggttcatgcgcgtttggggcatggtcggtacctgattgccgaagcagatgagagtgatgcatcgttcctgcatctgcaaccgatggtggcgattgtcaccaatatcgaagccgaccacatggatacctaccagggcgactttgagaatttaaaacagacttttattaattttctgcacaacctgccgttttacggtcgtgcggtgatgtgtgttgatgatccggtgatccgcgaattgttaccgcgtgtgggacgtcagaccacgacttacggcttcagcgaagatgccgacgtgcgtgtagaagattatcagcagattggcccgcaggggcactttacgctgctgcgccaggacaaagagccgatgcgcgtcaccctgaatgcgccaggccgtcataacgcgctgaacgccgcagctgcggttgcggttgctacggaagagggaattgacgacgaggctattttgcgtgcgctggagagcttccaggggactggtcgccgttttgatttcctcggtgaattcccgctggagccagtgaatggtaaaagcggtacggcaatgctggtcgatgactacggccaccacccgacggaagttgacgccaccattaaagcggcgcgcgcaggctggccggataaaaacctagtaatgctgtttcagccgcaccgttttacccgtacgcgcgacctgtatgatgatttcgccaatgtgctgacgcaggttgataccctgttgatgctggaagtgtatccggctggcgaagcgccaattccgggagcggacagccgttcgctgtgtcgcacaattcgtggacgtgggaaaattgatcccattctggtgccggaccctgcgcaggtagccgagatgctggcaccggtattaatcggtaacgacctgattctcgttcagggggctggtaatatcggaaaaattgcccgttctttagctgaaatcaaactgaagccgcaaactccggaggaagaacaacatgactgataaaattgcggtcctgttgggcgggacttccgctgagcgggaagtttctctgaattctggcgcagcggtgttagccgggctgcgtgaaggcggtattgatgcgtatcctgtcgacccgaaagaagtcgacgtgacgcaactgaagtcgatgggttttcagaaagtgtttatcgcgctacacggtcgcggcggtgaagatggtacgctgcagggcatgcttgagctgatgggcttgccttataccggcagcggagtgatggcatctgcgctttcaatggataaactacgcagcaaactgctgtggcaaggtgccggtttaccggtcgcgccgtgggtagcgttaacccgcgcagagtttgaaaaaggcctgagcgataagcagttagcagaaatttctgctctgggtttgccggttatcgttaagccgagccgcgaaggttccagtgtgggaatgtcaaaagtagtagcagaaaatgctctacaagatgcattaagattggcatttcagcacgatgaagaagtattgattgaaaaatggctaagtgggccggagttcacggttgcgatactcggtgaagaaattttaccgtcaatacgtattcaaccgtccggaaccttctatgattatgaggcgaagtatctctctgatgagacacagtatttctgccccgcaggtctggaagcgtcacaagaggccaatttgcaggcattagtgctgaaagcatggacgacgttaggttgcaaaggatggggacgtattgacgttatgctggacagcgatggacagttttatctgctggaagccaatacctcaccgggtatgaccagccacagcctggtgccgatggcggcacgtcaggcaggtatgagcttctcgcagttggtagtacgaattctggaactggcggactaatatgtcgcaggctgctctgaacacgcgaaatagcgaagaagaggtttcttctcgccgcaataatggaacgcgtctggcggggatccttttcctgctgaccgttttaacgacagtgttggtgagcggctgggtcgtgttgggctggatggaagatgcgcaacgcctgccgctctcaaagctggtgttgaccggtgaacgccattacacgcgtaatgacgatatccggcagtcgatcctggcattgggtgagccgggtacctttatgacccaggatgtcaacatcatccagacgcaaatagaacaacgcctgccgtggattaagcaggtgagcgtcagaaagcagtggcctgatgaattgaagattcatctggttgaatatgtgccgattgcgcggtggaatgatcaacatatggtagacgcggaaggaaacaccttcagcgtgccgccagatcgcaccagcaagcaggtgcttccaatgctgtatggcccggaaggcagcgccaatgaagtgttgcagggctatcgcgaaatggggcagatgctggcaaaggacagatttactctgaaggaagcggcgatgaccgcgcggcgttcctggcagttgacgctgaataacgatattaagctcaatcttggccggggcgatacgatgaaacgtttggctcgctttgtagaactttatccggttttacagcagcaggcgcaaaccgatggcaaacggattagctacgttgatttgcgttatgactctggagcggcagtaggctgggcgcccttgccgccagaggaatctactcagcaacaaaatcaggcacaggcagaacaacaatgatcaaggcgacggacagaaaactggtagtaggactggagattggtaccgcgaaggttgccgctttagtaggggaagttctgcccgacggtatggtcaatatcattggcgtgggcagctgcccgtcacgtggtatggataaaggcggggtgaacgacctcgaatccgtggtcaagtgcgtacaacgcgccattgaccaggcagaattgatggcagattgtcagatctcttcggtatatctggcgctttctggtaagcacatcagctgccagaatgaaattggtatggtgcctatttctgaagaagaagtgacgcaagaagatgtggaaaacgtcgtccataccgcgaaatcggtgcgtgtgcgcgatgaacatcgtgtgctgcatgtgatcccgcaagagtatgcgattgactatcaggaagggatcaagaatccggtaggactttcgggcgtgcggatgcaggcaaaagtgcacctgatcacatgtcacaacgatatggcgaaaaacatcgtcaaagcggttgaacgttgtgggctgaaagttgaccaactgatatttgccggactggcatcaagttattcggtattgacggaagatgaacgtgaactgggtgtctgcgtcgtcgatatcggtggtggtacaatggatatcgccgtttataccggtggggcattgcgccacactaaggtaattccttatgctggcaatgtcgtgaccagtgatatcgcttacgcctttggcacgccgccaagcgacgccgaagcgattaaagttcgccacggttgtgcgctgggttccatcgttggaaaagatgagagcgtggaagtgccgagcgtaggcggtcgtccgccacggagtctgcaacgtcagaccctggcagaggtgatcgagccgcgctataccgagctgctcaacctggtcaacgaagagatattgcagttgcaggaaaagcttcgccaacaaggggttaaacatcacctggcggcaggcattgtattaaccggtggcgcagcgcagatcgaaggtcttgcagcctgtgctcagcgcgtgtttcatacgcaagtgcgtatcggcgcgccgctgaacattaccggtttaacggattatgctcaggagccgtattattcgacggcggtgggattgcttcactatgggaaagagtcacatcttaacggtgaagctgaagtagaaaaacgtgttacagcatcagttggctcgtggatcaagcgactcaatagttggctgcgaaaagagttttaatttttatgaggccgacgatgattacggcctcaggcgacaggcacaaatcggagagaaactatgtttgaaccaatggaacttaccaatgacgcggtgattaaagtcatcggcgtcggcggcggcggcggtaatgctgttgaacacatggtgcgcgagcgtattgaaggtgttgaattcttcgcggtaaataccgatgcacaagcgctgcgtaaaacagcggttggacagacgattcaaatcggtagcggtatcaccaaaggactgggcgctggcgctaatccagaagttggccgcaatgcggctgatgaggatcgcgatgcattgcgtgcggcgctggaaggtgcagacatggtctttattgctgcgggtatgggtggtggtaccggtacaggtgcagcaccagtcgtcgctgaagtggcaaaagatttgggtatcctgaccgttgctgtcgtcactaagcctttcaactttgaaggcaagaagcgtatggcattcgcggagcaggggatcactgaactgtccaagcatgtggactctctgatcactatcccgaacgacaaactgctgaaagttctgggccgcggtatctccctgctggatgcgtttggcgcagcgaacgatgtactgaaaggcgctgtgcaaggtatcgctgaactgattactcgtccgggtttgatgaacgtggactttgcagacgtacgcaccgtaatgtctgagatgggctacgcaatgatgggttctggcgtggcgaacggtgaagaccgtgcggaagaagctgctgaaatggctatctcttctccgctgctggaagatatcgacctgtctggcgcgcgcggcgtgctggttaacatcacggcgggcttcgacctgcgtctggatgagttcgaaacggtaggtaacaccatccgtgcatttgcttccgacaacgcgactgtggttatcggtacttctcttgacccggatatgaatgacgagctgcgcgtaaccgttgttgcgacaggtatcggcatggacaaacgtcctgaaatcactctggtgaccaataagcaggttcagcagccagtgatggatcgctaccagcagcatgggatggctccgctgacccaggagcagaagccggttgctaaagtcgtgaatgacaatgcgccgcaaactgcgaaagagccggattatctggatatcccagcattcctgcgtaagcaagctgattaagaattgactggaatttgggtttcgaggctctttgtgctaaactggcccgccgaatgtatagtacacttcggttggataggtaatttggcgagataatacgatgatcaaacaaaggacacttaaacgtatcgttcaggcgacgggtgtcggtttacataccggcaagaaagtcactctgacgttacgccctgcgccggccaacaccggggtcatctatcgtcgcaccgacttgaatccaccggtagatttcccggccgatgccaaatctgtgcgtgataccatgctctgtacgtgtctggtcaacgagcatgatgtacggatttcaaccgtagagcacctcaatgctgctctcgcgggcctgggcatcgataacattgttatcgaagttaacgcgccggaaatcccgatcatggacggcagcgccgctccgtttgtatacctgctgcttgacgccggtatcgacgagttgaactgcgccaaaaaatttgttcgcatcaaagagactgttcgtgtcgaagatggcgataagtgggctgaatttaagccgtacaatggtttttcgctggatttcaccatcgattttaaccatccggctattgattccagcaaccagcgctatgcgatgaacttctccgctgatgcgtttatgcgccagatcagccgtgcgcgtacgttcggtttcatgcgtgatatcgaatatctgcagtcccgtggtttgtgcctgggcggcagcttcgattgtgccatcgttgttgacgattatcgcgtactgaacgaagacggcctgcgttttgaagacgaatttgtgcgtcacaaaatgctcgatgcgatcggtgacttgttcatgtgtggtcacaatattattggtgcatttaccgcttataaatccggtcatgcactgaataacaaactgctgcaggctgtcctggcgaaacaggaagcctgggaatatgtgaccttccaggacgacgcagaactgccgttggccttcaaagcgccttcagctgtactggcataacgacatttatactgtcgtataaaattcgactggcaaatctggcactctctccggccaggtgaaccagtcatttttttttgaattttataagagctataaaaaacggtgcgaacgctgttttcttaagcacttttccgcacaacttatcttcattcgtgctgtggactgcaggctttaatgataagatttgtgcgctaaatacgtttgaatacgatcgggatggcaataacgtgagtggaatactgacgcgctggcgacagtttggtaaacgctacttctggccgcatctcttattagggatggttgcggcgagtttaggtttgcctgcgctcagcaacgccgccgaaccaaacgcgcccgcaaaagcgacaacccgcaaccacgagccttcagccaaagttaactttggtcaattggccttgctggaagcgaacacacgccgcccgaattcgaactattccgttgattactggcatcaacatgccattcgcacggtaatccgtcatctttctttcgcaatggcaccgcaaacactgcccgttgctgaagaatctttgcctcttcaggcgcaacatcttgcattactggatacgctcagcgcgctgctgacccaggaaggcacgccgtctgaaaagggttatcgcattgattatgcgcattttaccccacaagcaaaattcagcacgcccgtctggataagccaggcgcaaggcatccgtgctggccctcaacgcctcacctaacaacaataaacctttacttcattttattaactccgcaacgcggggcgtttgagattttattatgctaatcaaattgttaactaaagttttcggtagtcgtaacgatcgcaccctgcgccggatgcgcaaagtggtcaacatcatcaatgccatggaaccggagatggaaaaactctccgacgaagaactgaaagggaaaaccgcagagtttcgtgcacgtctggaaaaaggcgaagtgctggaaaatctgatcccggaagctttcgccgtggtacgtgaggcaagtaagcgcgtctttggtatgcgtcacttcgacgttcagttactcggcggtatggttcttaacgaacgctgcatcgccgaaatgcgtaccggtgaaggtaaaaccctgaccgcaacgctgcctgcttacctgaacgcactaaccggtaaaggcgtgcacgtagttaccgtcaacgactacctggcgcaacgtgacgccgaaaacaaccgtccgctgtttgaattccttggcctgactgtcggtatcaacctgccgggcatgccagcaccggcaaagcgcgaagcttacgcagctgacatcacttacggtacgaacaacgaatacggctttgactacctgcgcgacaatatggcgttcagccctgaagaacgtgtacagcgtaaactgcactatgcgctggtggacgaagtggactccatcctgatcgatgaagcgcgtacaccgctgatcatttccggcccggcagaagacagctcggaaatgtataaacgcgtgaataaaattattccgcacctgatccgtcaggaaaaagaagactccgaaaccttccagggcgaaggccacttctcggtggacgaaaaatctcgccaggtgaacctgaccgaacgtggtctggtgctgattgaagaactgctggtgaaagagggcatcatggatgaaggggagtctctgtactctccggccaacatcatgctgatgcaccacgtaacggcggcgctgcgcgctcatgcgctgtttacccgcgacgtcgactacatcgttaaagatggtgaagttatcatcgttgacgaacacaccggtcgtaccatgcagggccgtcgctggtccgatggtctgcaccaggctgtggaagcgaaagaaggtgtgcagatccagaacgaaaaccaaacgctggcttcgatcaccttccagaactacttccgtctgtatgaaaaactggcggggatgaccggtactgctgataccgaagctttcgaatttagctccatctacaagctggataccgtcgttgttccgaccaaccgtccaatgattcgtaaagatctgccggacctggtctacatgactgaagcggaaaaaattcaggcgatcattgaagatatcaaagaacgtactgcgaaaggccagccggtgctggtgggtactatctccatcgaaaaatcggagctggtgtcaaacgaactgaccaaagccggtattaagcacaacgtcctgaacgccaaattccacgccaacgaagcggcgattgttgctcaggcaggttatccggctgcggtgactatcgcgaccaatatggcgggtcgtggtacagatattgtgctcggtggtagctggcaggcagaagttgccgcgctggaaaatccgaccgcagagcaaattgaaaaaattaaagccgactggcaggtacgtcacgatgcggtactggaagcaggtggcctgcatatcatcggtaccgagcgtcacgaatcccgtcgtatcgataaccagttgcgcggtcgttctggtcgtcagggggatgctggttcttcccgtttctacctgtcgatggaagatgcgctgatgcgtatttttgcttccgaccgagtatccggcatgatgcgtaaactgggtatgaagccaggcgaagccattgaacacccgtgggtgactaaagcgattgccaacgcccagcgtaaagttgaaagccgtaacttcgacattcgtaagcaactgctggaatatgatgacgtggctaacgatcagcgtcgcgccatttactcccagcgtaacgaactgctggatgtcagcgatgtgagcgaaaccatcaacagcattcgtgaagatgtgttcaaagcgaccattgatgcctacattccgccacagtcactggaagaaatgtgggatattccggggctgcaggaacgtctgaagaacgatttcgacctcgatttgccaattgccgagtggctggataaagaaccagaactgcatgaagagacgctgcgtgagcgaattctggcgcagtccatcgaagtgtatcagcgtaaagaagaagtggttggtgctgagatgatgcgtcacttcgaaaaaggcgtcatgctgcaaactctcgactctctgtggaaagagcacctagcggcgatggactatctgcgtcagggtatccacctgcgtggctatgcacagaaagatccgaagcaggaatacaaacgtgaatcgttctccatgtttgcagcgatgctggagtcgttaaaatatgaagttatcagcacgctgagcaaagtccaggtacgtatgcctgaagaggttgaggagctggaacaacagcgtcgtatggaagccgagcgtttagcgcaaatgcagcagcttagccatcaggatgacgactctgcagccgcagctgcactggcggcgcaaaccggtgagcgcaaagtaggacgtaacgatccttgcccgtgcggttctggtaaaaaatacaagcagtgccatggtcgcctgcaataaaagctaacagttgaagtaaaaggcgcaggattctgcgccttttttataggtttaagacaatgaaaaagctgcaaattgcggtaggtattattcgcaacgagaacaatgaaatctttataacgcgtcgcgcagcagatgcgcacatggcgaataaactggagtttcccggcggtaaaattgaaatgggcgaaacgccggaacaggcggtagtgcgtgaacttcaggaagaagtcgggattaccccacaacatttttcgctatttgaaaaactggaatatgaattcccggacaggcatataactctgtggttctggctggtcgaaagctgggaaggggagccgtggggtaaagaagggcaacccggtgagtggatgtcgctagtcggtcttaatgccgatgattttccgccagccaatgaaccggtaattgcgaagcttaagcgtctgtaggtcggataaggcgttcacgccgcatccgacatttgcacaagatgcctgatgcgacgctgtccgcgtcttatcaggcctacgtgcggcatcagacaaatgtcactgctttggctcttcgctccagtcatcgctttcggaaagatcgccactgctggggattcgtttttcttcagcagcccattctccgaggtcgatcagctgacaacgtttggagcaaaatggccgaaacgggctgatttcaccccacaccaccgttttcccgcaggttgggcaattcaccgtaatagtttctgacatttttactccttagcaacaggccagttcgaaatccagacgttccggtacctgtccgttttcagtgtccagcggcataaaacgaatggcaaaacggctcttatgtccggaaatttgcggataaagctgtgaatcgagcgacagattcaggcgcagcaagtcggcatcgccaccgttatcctgataaaaaccattcagactggtttgtttacggaagggggccgactggcgaattaaatccagcaccatggtaagtgcctgggtgagcgggttcaggctggcaatccaggtttctacctggctgtcgcgctgcgcctggggtagatgcagccaaatgtgcaatgtaggtaaatcaaagctgcaacagccgcctgggatgctcagtcgctgacgcaccagagcaatcaaacgatcttcacgcagaaattgcccgatacgcggcgcggaaattaatacgctccccgccgcttttaactgctgaattaatgcttcaatacggctctggtccacgccaggcacgccaatccaggtctggagtttacgttgctgccggtcaagttctttcaacagctcagtgcggacttcgccgcgctcgaaaacatccagtaattcactgacattacggaagaaatgcagcgcgccagcgtggtcaacgatgggtaaattaacggtgagttgctgaatcaaaaactcaatgcgcagccatgtacgcattttttcatttagtggatgttcaaaaaggacctgggtctgcattacggtttttcctgtgagacaaactgcgacgcaagctgcaaatagtgtgcgtgcaggcgggcaacatccgatgcgatagcatccggtgcgccgttattatcaatgacgtcatctgccacggcaaggcgggcttcgcgcgttgcctgagcagcaaggatttgttcgacatgctcgcgagttacatcatcgcgctgcatggtgcgcttaagttgcgtttctgggctgacatccaccaccagcactcgattcgcttttttatacagtgagttttctaccagcaatggcacaacccacagtacatagggggaagtagcttgctggatctggtgttgcgtctcttgctgaatcagcggatgcagcagggcgttaagccagtttttctcttccgggttggcgaagatccgctcgcgcaaggcccggcgctgcaatgttccatcagcagcaatcatgttagcgccaaagtgatcagcaatggcatgtagcgcaggtgcacctggttcaaccacctgacgcgcaataatatcggcatcaatgacgttaattccgagatcagcaaacgcattggcaacggtactcttgccactgccaatgcctcccgttaaggcaactatatacctcataatttatattcccgggaattcatcatgattatcaaaacgttaaaaatgagtgcacgaaagcgaaattgatgaaacgttcgctcactatttaccaggtaaatttatgggattgtagcgtaaaaaaagacaatttcgcagtcttgcgccgcattgattagtgcgtatgatagcgtcactggagttgcgctcttacccttatagccattaaccccaggaatccgcacatgcgtattgaagaagatctgaagttaggttttaaagacgttctcatccgccctaaacgctccactcttaaaagccgttccgatgttgaactggaacgtcaattcaccttcaaacattcaggtcagagctggtccggcgtgccgattatcgccgcaaatatggacaccgtaggtacattttctatggcctctgcgctggcttcttttgatattttgactgctgtgcataaacactattctgtcgaagagtggcaagcgtttatcaacaattcttccgctgatgtgctgaaacatgtgatggtttctaccggtacgtctgatgcggatttcgaaaaaactaaacagattctcgacctgaacccggcattaaacttcgtttgtattgatgtggcgaatggttattccgaacacttcgtgcagttcgttgcgaaagcgcgtgaagcgtggccgaccaaaaccatttgtgctggcaacgtagtgactggtgaaatgtgtgaggagcttatcctctccggtgctgatatcgttaaagttggcattggcccaggttctgtttgtacaactcgcgtcaaaacaggcgtcggttatccgcagctttctgcggtaatcgaatgtgccgatgcggcgcacggtctgggcggaatgatcgtcagcgacggtggctgcaccacgccgggcgatgtcgcaaaagcctttggcggcggtgccgatttcgtcatgcttggcggcatgctggcgggccacgaagagagcggcggtcgcatcgttgaggagaacggcgagaaatttatgctgttctacggcatgagctccgagtctgcgatgaaacgtcacgttggcggcgttgcggaatatcgcgcagcagaaggtaaaaccgttaagctgccgctgcgaggcccggttgaaaataccgcgcgtgatattttgggcggcctgcgttcagcttgtacatacgttggggcttcacgcctgaaagaactgaccaagcgcaccacatttatccgtgtgcaggaacaagaaaaccgcatcttcaacaacctgtaatcttccaacgctggtgtggagcaacacgccagcgttatcccatcccactcatcgcatcgcctaaatggaaaattggcagatacatcgccaccaccagcgtaccgataattcctcccgttatgatcagcaacgtcggttccagtaaggctgcgaggttatccgccagcgccattgtgttatcccgatgatgatgggcgaggttgtctaacatgaggtccagcgagccggatgcctctcctgttctcactaattgcaaacagagcgggctaaactccccggtattttttagcgccagccagatgggatgaccgttactgatatcgtgctggatttgtgtcagaagttgcacccagtacgggcagcgcattgtttctctgacgctctctacgccctgcaaaaaagtaatgcctgcactttgtgtcagcgccagaatcgtaaagatctgcgtgagtttttgtccccgcatcagtgaacccataatcgggatgcgtaacagcaatttctgccgcactataagccaggtcggtcggcgcatcagcaacttattggctatcgccagcagaaagccgaacaacaccagcagccagctccattcgccactaaagtctgccagcgtcatgatcccctgcgttagtgccggtagtggggtgttgaaggtcttatagatagcggcaaactccggcagaacaaaatgcagcattgccacaaccaccatgattgccatcgctaaaatgatgatgggataacgtaacgctgatttcactttgtcggtcaactgacgctgggctttttgctgacgcgccagttcaaagcagcattcatccagcttaccggtcagttcacccgtgcggatcatcgcctgatagagtggcggaaatacctctgaccagggtaataaggcattggaaaaagcaatgccctgttcgagatcgtgcgccagcgattgcagcaacgcttgccattgcttactgggatgctgttccgccagcagtgccagcccttcagaaagcgttaacccggctttgagtagcgtcgccagttgatgaatgacttccgcgcttttatctcctcgccactgcgcagaattgatggcgattcgcttcaggctaagtggggtaaccatctgttgctgtagtgccatgagcagcaaagcacggctctctgcccatagcatcccatcttgcgcattgccgtcgccggttatgccatgccagcgccagagttgcttactcgccatgcggcatccccagtacgcggattaactcttcaaaggtggttaagccttgctccacggccaggcagccgttttcaaaaagcgtacgcatacccgcctgtcgtgcgtgcgtttccagcgattcaacgtcggtattagcggaaataagctgacgaatgaccggcgttatgggcagaacttcaaataaggccgtacgaccataaaaaccgtggtagcaatgtacacaaccgggtgcctgccagtggggcagcggcgacggccatacattgactggaatatggatgggctccccttgctgctggcgacaatgtgggcaaagtttacgtaccagacgctgggctattaccagcgtaagcgctgatgagagcatccagcgggcgactcccatttgctgtaaacgtaccagcgtttcgcaggtggaattagtgtgtagggtagacaacaccaggtgaccggtttgcgcggctttaatggcaatttctgccgtttcgccatcgcggatctctccgatcatgatgacgtcaggatcctggcgcaataacgcacgcaaaacgccctgaaaggtgagcccggcacgcggatggatttgcgtctggtttagtccggctatggggatctcaaccggatcttcgacgctacaaatattaatgtcagcggtattcagcttttgcagggcactataaagcgtgaccgttttgccgctgcctgtagggccagttaccagcaccagtccctgtggttgttgcaaggcatgagcaaagtccgccagttgtaacggctgcattcccagcgtgttaacatccagtgcctggttcacctgctgtaacaaccttaataccaccttttcaccaccccgacatggtaaggtcgcaatacgaaatgagacggcgtttcctgccagttcgacagtgaattgcccgtcctgcggcaggcgatgttccgcaatatccaggtttcccagcacttttaatctggcggttaatgcgactccggcatccggtgaaacatccggtaaaggatgcaatacgccgtcgatacgcaagcggatgcggtaggcattgtccgctggttcgatatgaatatcagacgcacgttgttccagcgcagattgtaacgttcgagtcagcaactctgctttgggctgatgcttctcctgaacagctacgggcaatgtctgttgtgtgcgactggcgtggccttccatttgttggcgcgtccagcaggtgatctcaatacgtttggtggtagcgaaatgcaatgcgtccagcaactcatgcgaaggtgcatcgactaccgcaacatgaaccacctcttcgctggcatccagcaagactccctgataacgcagacacagggcggtgagctgtggaatattcattgccgctccttagttggcgtcatcaaagcggaagacatcttcgcaggcttgctgcaatgcgctgtcactttgaatattgcagttgcgcgcccagccggtgacgccgtttgcgttatcccaacccggtgtcatgacgacgcttagtccattgagactttcttgcccggtcagcgacaccacgccttttgccacactcatggctgaaacatagcgggtggtggtaggcgagggaatgccattgctgccaccgtcgcaggtatctaatccaccatgttccagcgcgcacaactctacggctgtacggtaaggcacaaaggtttgtagcatgtcggtgagtgcagctttgcgcaggtagttttgataagcgggaataccaatggcgcttaaaatggcaatgatgccaataaccaccatcagttcgataagtgtaaaaccgcgttgcttgtccatctgtttcgctccttgatttggttggcgctactttggcaaacgccatcagcacaagcgaggggcaaaaaacgaaacgggaaagcagcttccgaggttttttatttcgttgcagcaaaagacaagaaatttgcgaggcgttacgaagaaagttggggaaggggagattatccgcccgcgatggagcggataaatctgtcagcaattagcgaaaacgcattgaaaggtcgagtgcttgtacgtgtttagttagcgcaccgacggagataaagtccacgcccgtttcggcaaattcgcgcagtgttttgtcagtgacgttgccagacacttccagtagcgccttgccgttggtgcgtttgacggcttcgcgcatctgttctgtttcgaagttatccagcatgatgatatcggctcctgctttcagggcttcatcaagttcttccagattctctacttcgacttctactggcgcatccgggtgcagccaggacgctttttcgacggcctggcgcactgagccggaggcaataatatgattttctttgatcaggaaggcatcagaaagccccagacggtgattcgctccgccgccgcaaagtaccgcgtatttcagagctgaacgcaggccaggtaaggttttgcgcgtatccaacaactgcgtgttggtgccttccagtaattcgacatagtggcgtaccttactggcaactcctgaaagggtttgcacaaaattaagcgcagtgcgttcgcccgttaacagcacgcgggatgggccttcaagttcgaacaagggttgattggcgttgatgacatcgccgtcatccacatgccagattatggtgacatcgtcgcctgccagttgaataaacacctcttcaacccagcgtttgccgcaaaatacgccattctcgcgggtgctcaccgtggcatgagagcgagagttttccggtaaaagttttgccgtaatgtcattgttggcatcgactgttccgcctaaatcttcccgcagcgcctgggccaccgcgccggggatatcgagattaatgcgttccagcagctcgtcacgtcgggtgtcagggttatagcggcgaggcggcatgttaaaactccagatagctaacgaatcataaggtagaaacatgctactctgaaccgggtattagcaccacatataaggagatcctgcatgttgttagaacaggggtggctggttggcgcgcgccgcgttccctcaccacattacgattgccgcccggatgacgaaacacccaccctgctggtggtgcacaatattagcctgccgccaggcgagtttggcggtccgtggatcgacgcattattcactggaactattgatccgcaggcacatcctttctttgctgagatcgcccatttgcgcgtctccgctcactgtttgattcgccgtgatggtgaaatagtccagtatgttcctttcgataaacgtgcttggcatgcgggagtctctcagtatcaggggcgtgaacgctgcaatgatttttctattgggattgagcttgaaggcaccgatactctggcgtataccgatgcgcagtatcaacagcttgcggcggttacgcgggcactgatagatcgctatcccgatatcgctaataacatgacgggccattgtgatattgcgccggatcggaaaaccgatcccggtcctgcatttgattgggcacggtttcgtgcgctggtcagcaaggagacaacatgacgctatttacaaccttactggtgttaattttcgagcgcctgtttaagttgggcgagcactggcagcttgatcatcgtcttgaagcgttctttcggcgggtgaaacatttttctctcgggcgcacgttaggcatgaccattattgcgatgggcgtgacttttttactgttacgcgcattgcagggagtattgttcaacgttcccacgctgctggtgtggctgctgattggtttgctgtgtattggcgcaggtaaagttcgtcttcattatcatgcttatctgacagctgcttcacgtaatgatagccatgcccgtgccacgatggctggcgaactcaccatgattcacggcgtcccggcaggctgcgacgaacgtgagtatttgcgtgagctgcaaaatgcattgctgtggattaactttcgtttttatcttgcaccgctgttctggttgattgtggggggaacctggggacccgttacgctgatggggtatgcgtttttgcgtgcatggcaatactggctggcgcgataccagacgccgcatcatcgtttacagtccggcattgatgccgtgcttcatgtactggattgggtgccggttcgtcttgcgggtgtggtatatgccttgatcggtcatggggagaaagcgttaccggcctggtttgcttcgctgggtgacttccatacttcgcagtatcaggtgttaacgcgtctggcgcagttctctctggcgcgtgaaccgcatgtcgataaggtggagacgccgaaggcagcggtttcaatggcgaagaaaacctcgttcgtggtcgtggtggtgattgcgctactgacgatttacggagcgttggtgtaaagattattgccctcaccctgcatgggtgagggcgtagagagattaatgcgcttttacggctttggcggttttctctttaaacagatagccgatacctaacacgatcagccataccgggatcaggtataccgaaatcgccattcctggggtcatcagcataatcaccagtaccgccgccataaacagcaggcagatccagttacccagcggataaagcagagcagggaagcgagttaccacgccttgttcctgcttggcgcgacggaacttcatatgcgccagactgatcatcgcccagttgatcaccagtgcggataccaccagtgccattaacaggccaaatgcggattccggagcaagatagttaatcaatacgcacaatgctgtaaccagcgcagacaccagaatggtgttaaccggtacgccgcgtttatcgacagacgccagcgcttttggcgcattaccctgttgtgccagaccaaacagcatacggctgttgcaatatacgcagctgttgtacacggagagcgccgcagtcagtaccacgatgttcagcgcattcgccacaaaggtatcgcctaactcgtggaagatcagcacaaacggactggtatcggcggtaacgcgggtccacggcatcagtgagagcagaacggctaacgaaccaatatagaaaatcaggatgcggtagataacctggttagtcgctttcgggatactttgctccgggttatcagcttctgctgcggtgatccccaccagttccagaccaccgaacgagaacatgataatcgccatcatcatcaccagtccggtgaagccgtgcggcaggaaaccaccttgatcccacaggttgctaacgctcgcctgcgggccgccgttgccactgaacagcagccagccgccgaagatgatcatcgctactatcgcaataactttgataatggcaaaccagaactccatctcgccaaacactttaacgttggtcaggttgatggcgttaatcaccacaaagaatacggcggcagaaacccaggttgggatttccggataccagaactgaatgtatttacccacggcagtcagctctgccatggcaactaaaacgtacagtacccagtagttccagccagaggcgaaaccggcaaaactgccccagtatttataagcaaagtggctaaaggagcctgcgacaggttcttcgaccaccatttcacccagctgacgcatgatcagaaaggcgataaaaccagcaatggcgtaacccaggataatccctggccctgcggactgtattacggaggcgctacccaggaatagccctgtccctatcgcgccacccagcgcgataagctgaatatggcggtttttaaggccgcgctttagctgctcgccgtgctgttgaccttccatcatgaaacctcgtgcggtgattgtttttttgatctacgcagtgatgcgtgtgtaagtttgcaattccgtttgttgtattaatttttttacatcaaagaagtttgaattgttacaaaaagacttccgtcagatcaagaataatggtatgcggcagcgaatgcacccgctttatgcatggttgaagatgagttgcttaaaaagaaaccgtttgtaaagctcagcctcaacccctctcaatatgcagaatgaatttaaattcgtttttattgacttaaaaatcaaaaaattggtaagtgaatcggttcaattcggatttttatagtttaataatcgttaaaaaatccctttcctacgtaaagtctacatttgtgcatagttacaattttgaaacgttatatatgtcaagttgttaaaatgtgcacagtttcatgatttcaatcaaaacctgtatggacataaggtgaatactttgttactttagcgtcacagacatgaaattggtaagaccaattgacttcggcaagtggcttaagacaggaactcatggcctacagcaaaatccgccaaccaaaactctccgatgtgattgagcagcaactggagtttttgattctcgaaggcactctccgcccgggcgaaaaactcccaccggaacgcgaactggcaaaacagttcgacgtctcccgtccctccttgcgtgaggcgattcaacgtctcgaagcgaagggcttgttgcttcgtcgccagggtggcggcacttttgtccagagcagcctatggcaaagcttcagcgatccgctggtggagctgctctccgaccatcctgaatcacagtatgacttgctcgaaacacgacacgccctggaaggtatcgccgcttattacgccgcgctgcgtagtaccgatgaagacaaggaacgcatccgtgaactccaccacgccatagagctggcgcagcagtctggcgatctggacgcggaatcaaacgccgtactccagtatcagattgccgtcaccgaagcggcccacaatgtggttctgcttcatctgctaaggtgtatggagccgatgttggcccagaatgtccgccagaacttcgaattgctctattcgcgtcgcgagatgctgccgctggtgagtagtcaccgcacccgcatatttgaagcgattatggccggtaagccggaagaagcgcgcgaagcatcgcatcgccatctggcctttatcgaagaaattttgctcgacagaagtcgtgaagagagccgccgtgagcgttctctgcgtcgtctggagcaacgaaagaattagtgatttttctggtaaaaattatccagaagatgttgtaaatcaagcgtatataaaagcgcggcaactaaacgtagaacctgtcttattgagctttccggcgagagttcaatgggacaggttccagaaaactcaacgttattagatagataaggaataacccatgtcagaacgtttcccaaatgacgtggatccgatcgaaactcgcgactggctccaggcgatcgaatcggtcatccgtgaagaaggtgttgagcgtgctcagtatctgatcgaccaactgcttgctgaagcccgcaaaggcggtgtaaacgtagccgcaggcacaggtatcagcaactacatcaacaccatccccgttgaagaacaaccggagtatccgggtaatctggaactggaacgccgtattcgttcagctatccgctggaacgccatcatgacggtgctgcgtgcgtcgaaaaaagacctcgaactgggcggccatatggcgtccttccagtcttccgcaaccatttatgatgtgtgctttaaccacttcttccgtgcacgcaacgagcaggatggcggcgacctggtttacttccagggccacatctccccgggcgtgtacgctcgtgctttcctggaaggtcgtctgactcaagagcagctggataacttccgtcaggaagttcacggcaatggcctctcttcctatccgcacccgaaactgatgccggaattctggcagttcccgaccgtatctatgggtctggggccgattggtgctatttaccaggctaaattcctgaaatatctggaacaccgtggcctgaaagatacctctaaacagaccgtttacgcgttcctcggcgacggtgaaatggacgaaccggaatccaaaggtgcgatcaccatcgctacccgtgaaaaactggataacctggtcttcgttatcaactgtaacctgcagcgtcttgacggcccggtcaccggtaacggcaagatcatcaacgaactggaaggcatcttcgaaggtgctggctggaacgttatcaaagtgatgtggggtagccgttgggatgaactgctgcgtaaagataccagcggtaaactgatccagctgatgaacgaaaccgttgacggcgactaccagaccttcaaatcgaaagatggtgcgtacgttcgtgaacacttcttcggtaaatatcctgaaaccgcagcactggttgcagactggactgacgagcagatctgggcactgaaccgtggtggtcacgatccgaagaaaatctacgctgcattcaagaaagcgcaggaaaccaaaggcaaagcgacagtaatccttgctcataccattaaaggttacggcatgggcgacgcggctgaaggtaaaaacatcgcgcaccaggttaagaaaatgaacatggacggcgtgcgtcacatccgcgaccgtttcaatgtgccggtgtctgatgcagatatcgaaaaactgccgtacatcaccttcccggaaggttctgaagagcatacctatctgcacgcacagcgtcagaaactgcacggttatctgccaagccgtcagccgaacttcaccgagaagcttgagctgccgagcctgcaagacttcggcgcgctgctggaagagcagagcaaagagatctctaccactatcgctttcgttcgtgccctgaacgtaatgctgaagaacaagtcgatcaaagatcgtctggtaccgatcatcgccgacgaagcgcgtactttcggtatggaaggtctgttccgtcagattggtatttacagcccgaacggtcagcagtacatcccgcaggaccgcgagcaggttgcttactataaagaagacgagaaaggtcagattctgcaggaagggatcaacgagctgggcgcagggtgttcctggctggcagcggcgacctcttacagcaccaacaatctgccgatgattccgttctacatctattactcgatgttcggcttccagcgtatcggcgatctgtgctgggcggctggcgaccagcaagcgcgtggcttcctgatcggcggtacttccggtcgtaccaccctgaacggtgaaggtctgcagcacgaagatggtcacagccacattcagtcgctgactatcccgaactgtatctcttacgacccggcttacgcttacgaagttgctgtcatcatgcatgacggtctggagcgtatgtacggtgaaaaacaagagaacgtttactactacatcactacgctgaacgaaaactaccacatgccggcaatgccggaaggtgctgaggaaggtatccgtaaaggtatctacaaactcgaaaccattgaaggtagcaaaggtaaagttcagctgctgggctccggttctatcctgcgtcacgtccgtgaagcggcagagatcctggcgaaagattacggcgtaggttctgacgtttatagcgtgacctccttcaccgagctggcgcgtgatggtcaggattgtgaacgctggaacatgcttcatccgctggaaactccgcgcgttccgtatatcgctcaggtgatgaacgacgctccggcagtggcatctaccgactatatgaaactgttcgctgagcaggtccgtacttacgtaccggctgacgactaccgcgtactgggtactgatggcttcggtcgttccgacagccgtgagaacctgcgtcaccacttcgaagttgatgcttcttatgtcgtggttgcggcgctgggcgaactggctaaacgtggcgaaatcgataagaaagtggttgctgacgcaatcgccaaattcaacatcgatgcagataaagttaacccgcgtctggcgtaagaggtaaaagaataatggctatcgaaatcaaagtaccggacatcggggctgatgaagttgaaatcaccgagatcctggtcaaagtgggcgacaaagttgaagccgaacagtcgctgatcaccgtagaaggcgacaaagcctctatggaagttccgtctccgcaggcgggtatcgttaaagagatcaaagtctctgttggcgataaaacccagaccggcgcactgattatgattttcgattccgccgacggtgcagcagacgctgcacctgctcaggcagaagagaagaaagaagcagctccggcagcagcacccgcggctgcggcggcaaaagacgttaacgttccggatatcggcagcgacgaagttgaagtgaccgaaatcctggtgaaagttggcgataaagttgaagctgaacagtcgctgatcaccgtagaaggcgataaagcttctatggaagttccggctccgtttgctggcaccgtgaaagagatcaaagtgaacgtgggtgacaaagtgtctaccggctcgctgattatggtcttcgaagtcgcgggtgaagcaggcgcggcagctccggcggctaaacaggaagcagctccggcagcggcccctgcatcagcggctggcgtgaaagaagttaacgttccggatatcggcggtgacgaagttgaagtgaccgaagtgatggtgaaagtgggcgacaaagttgccgctgaacaatcgcttatcaccgtagaaggcgataaagcttctatggaggtcccggctccgtttgcaggcgtcgtgaaggaactgaaagtcaacgttggcgataaagtgaaaactggctcgctgattatgatcttcgaagttgaaggcgcagcgcctgcggcagctcctgcgaaacaggaagcggcagcgccggctccggcagcgaaagctgaagccccggcagcagctccggctgcgaaagccgaaggcaaatctgaatttgctgaaaacgacgcttacgttcacgcgactccgctgatccgccgtctggcacgcgagtttggcgttaacctggcgaaagtgaagggcactggtcgtaaaggtcgtatcctgcgcgaagacgttcaggcttacgtgaaagaagctatcaaacgtgcagaagcagctccggcggcgactggcggtggtatccctggcatgctgccgtggccgaaggtggacttcagcaagtttggcgaaatcgaagaagtggaactgggccgtatccagaaaatttctggtgctaacctgagccgtaactgggtgatgatcccgcatgttacccacttcgacaaaaccgatatcaccgagctggaagcgttccgtaaacagcagaacgaagaagcggcgaaacgtaagctggatgtgaagctcaccccggttgtcttcatcatgaaagccgttgctgcagctcttgagcagatgcctcgcttcaatagttcgctgtcggaagacggtcagcgtctgaccctgaagaaatacatcaacatcggtgtggcggtggataccccgaacggtctggttgttccggtattcaaagacgtcaacaagaaaggcatcatcgagctgtctcgcgagctgatgactatttctaagaaagcgcgtgacggtaagctgactgcgggcgaaatgcagggcggttgcttcaccatctccagcatcggcggcctgggtactacccacttcgcgccgattgtgaacgcgccggaagtggctatcctcggcgtttccaagtccgcgatggagccggtgtggaatggtaaagagttcgtgccgcgtctgatgctgccgatttctctctccttcgaccaccgcgtgatcgacggtgctgatggtgcccgtttcattaccatcattaacaacacgctgtctgacattcgccgtctggtgatgtaagtaaaagagccggcccaacggccggcttttttctggtaatctcatgaatgtattgaggttattagcgaatagacaaatcggttgccgtttgttgtttaaaaattgttaacaattttgtaaaataccgacggatagaacgacccggtggtggttagggtattacttcacataccctatggatttctgggtgcagcaaggtagcaagcgccagaatccccaggagcttacataagtaagtgactggggtgagggcgtgaagctaacgccgctgcggcctgaaagacgacgggtatgaccgccggagataaatatatagaggtcatgatgagtactgaaatcaaaactcaggtcgtggtacttggggcaggccccgcaggttactccgctgccttccgttgcgctgatttaggtctggaaaccgtaatcgtagaacgttacaacacccttggcggtgtttgcctgaacgtcggctgtatcccttctaaagcactgctgcacgtagcaaaagttatcgaagaagccaaagcgctggctgaacacggtatcgtcttcggcgaaccgaaaaccgatattgacaagattcgtacttggaaagagaaagtgatcaatcagctgaccggtggtctggctggtatggcgaaaggccgcaaagtcaaagtggtcaacggtctgggtaaattcaccggggctaacaccctggaagttgaaggtgagaacggcaaaaccgtgatcaacttcgacaatgcgatcattgcagcgggttctcgcccgatccaactgccgtttattccgcatgaagatccgcgtatctgggactccactgacgcgctggaactgaaagaagtaccagaacgcctgctggtaatgggtggcggtatcatcggtctggaaatgggcaccgtataccacgcgctgggttcacagattgacgtggttgaaatgttcgaccaggttatcccggcagctgacaaagacatcgttaaagtcttcaccaagcgtatcagcaagaaattcaacctgatgctggaaaccaaagttaccgccgttgaagcgaaagaagacggtatttatgtgacgatggaaggcaaaaaagcacccgctgaaccgcagcgttacgacgccgtgctggtagcgattggtcgtgtgccgaacggtaaaaacctcgacgcaggcaaagctggcgtggaagtggacgaccgtggtttcatccgcgttgacaaacagctgcgtaccaacgtaccgcacatctttgctatcggcgatatcgttggtcagccgatgctggcacacaaaggtgttcacgaaggtcacgttgccgctgaagttatcgccggtaaaaaacactacttcgatccgaaagttatcccgtctatcgcctataccgaaccagaagttgcatgggtaggtctgactgagaaagaagcgaaagagaaaggcatcagctatgaaaccgccaccttcccgtgggctgcttctggtcgtgctatcgcttccgactgcgcagacggtatgaccaagctgattttcgacaaagaatctcaccgtgtgatcggtggtgcgattgtcggtactaacggcggtgagctgctgggtgaaatcggtctggcaatcgaaatgggttgtgatgctgaagacatcgcactgaccatccacgcgcacccgactctgcacgagtctgtgggcctggcggcagaagtgttcgaaggtagcattaccgacctgccgaacccgaaagcgaagaagaagtaatttttcgtttgccggaacatccggcaattaaaaaagcggctaaccacgccgctttttttacgtctgcaatttacctttcctgtcgccttgctccgcgctcagagagacgttcgcgtactgctgaccgttgctcgttattcagcctgacagtatggttactgtcgtttagacgttgtgggcggctctcctgaactttttcccgaaaaacctgacgttgttcaggtgatgccgattgtatacgctggcgggcgttatcacgttgctgttggttcagtgggcgctgctgtactttttccttaaacacctggcgctgttcgggagttgcagactgaatacgctcacgcgctgcctctcttcgctgctggttctgtgggttagtctgcattttctcgcgaaccgcctggcgctgctcaggagaggccgattgataacgctgacgagcggcgtccttttgttgctgggtcagtggttggcgacggctgaagtcgcggaagtcgtcatagctcccatagtgttcagcttcattaaaccgctgtgccgctgcctgacgttgggtatctcgtgtaatgacgggggcggcgtgtgttcgttgctgaaactgacttgctgccgcctgacgctggctgtcgcgtgttggagcaggtagctgcgtggcactcattccgccgttgacatcggtttgatgaaaccgctttgccatatcctgatcatgatagggcacaccattacggtagtttggattgtgccgccatgccatattcttatcagtaagatgctcaccggtgatacggttgaaattgttgacgtcgatattgatgttgtcgccgttgtgttgccagccattaccgtcacgatgaccgccatcgtggtgatgataatcatcatcgtcatgatgatgatggtcatgatcgtcgtcatcccagtcgatgctgctaaatagtgcgtacgtggtagcaacgcccatgctatagccgaatccgcgcacaaagctgtcaacaaacggttctccggctggtggtggcagataaaccggcggatacgcagtattggcccagttcccgtaaaccacggttgggttgtagttgggaatatagaccacatcaggattggcgggctcaatggaaatgacggttgttgccggctctgtaatgacggggttggcagttaaaacggtattggatggtatgacgggtgccgtgactgtctgttttaccggtacagctttcttcgttgtggtaataactttctgttcggttgatgacttcagcgagccggtttgttgcgccagttgccgcaatcgctgtaccgagtccatcacgtcctgcggctgcgccagaaaagcatcgcccaggttttgcacccattgcgggttttcgcccatcaatgccatcaattgtggaaaggccaccagtgatttaacgctggcgtcccacggctggtcagataccgcctgaatagcagcatcgccttgtttaagtggattatcgtgcgaccattgcactgcttgagcaacgtttgccggataggttgatgccattaacacttgtgaaagcagagaatcggggtacagcgcgacaggcgcaacccattgatcgatttgtgcagtgctgaatgcggatttgacgacggcgggcgttacgggcggtgcggaaaccgttgcaggaagcgtaactgcggtgatgtcaggcgcagtctgttgtgtcgattgcgtttccacaggcgcttccactgtgcggctttttatatatagcccggcagaggcggcacaaagcccggcactgcaaattagtgccagcacatggggtttaaacggcaaagtcattttcataattcggatctcaaggaaatcgcaatggtcggcgaactgccacccgcaggtgctgttaatccgagtataaagaggcggtagtttaaattttgactaatcttgggattcgttgagaaaggtgattatcaccatgcgaattaacgaagtttttacggagggaaacaatctctagaccatccttaacgattcagccacttttttatgttgcttttttgtaaacagattaacacgtcgtcaaaatcctgctattctgcccgttgcggtactgggcatttaccctacaaactgctgtctcacaggagcgtgaagagaatcgcctgccgcactatgacaatgagagcgaggagaaccgtcgtgctagaagaataccgtaagcacgtagctgagcgtgccgctgaggggattgcgcccaaacccctggatgcaaaccaaatggccgcacttgtagagctgctgaaaaacccgcccgcgggcgaagaagaattcctgttagatctattaaccaaccgtgttccccctggcgtcgatgaagccgcctatgtcaaagcaggcttcctggctgctatcgctaaaggcgaagccaaatcccctctgctgactccggaaaaagccatcgaactgctgggtaccatgcagggtggttacaacattcatccgctgatcgacgcgctggatgatgccaaactggcaccgatcgctgccaaagcactttctcacacactgctgatgttcgataacttctatgacgtagaagagaaagccaaagcaggcaacgaatatgcgaagcaggtaatgcagtcctgggcggatgccgaatggttcctgaatcgcccggcgctggctgaaaaactgaccgttaccgtcttcaaagtcactggcgaaaccaacactgatgacctttctccggcaccggatgcgtggtcgcgcccggatatcccactgcacgcgctggcgatgctgaaaaacgcccgtgaaggtattgagccagaccagccaggtgttgttggcccgatcaagcaaatcgaagctctgcaacagaaaggtttcccgctggcgtacgtcggtgacgttgtgggtacgggttcatcgcgtaaatccgccacgaactccgttctgtggtttatgggcgatgatattccacatgtgccgaacaaacgcggcggtggtttgtgcctcggcggtaaaattgcacccatcttctttaacacgatggaagacgcgggtgcactgccaatcgaagtcgacgtctctaacctgaacatgggcgacgtgattgacgtttacccgtacaaaggtgaagtgcgtaaccacgaaaccggcgaactgctggcgaccttcgaactgaaaaccgacgtgctgattgatgaagtgcgtgctggtggccgtattccgctgattatcgggcgtggcctgaccaccaaagcgcgtgaagcacttggtctgccgcacagtgatgtgttccgtcaggcgaaagatgtcgctgagagcgatcgcggcttctcgctggctcagaaaatggtaggtcgtgcctgcggtgtgaaaggtattcgtccgggcgcgtactgcgaaccgaaaatgacttctgtaggttcacaggacaccaccggcccgatgacccgtgatgaactgaaagacctggcgtgcctgggcttctcggctgacctggtgatgcagtctttctgccataccgcggcgtatccgaagccagttgacgtgaacacgcaccacacgctgccggacttcattatgaaccgtggtggtgtgtcgctgcgtccgggtgacggcgtaatccactcctggctgaaccgtatgctgctgccggataccgtcggtaccggtggtgactcccatacccgtttcccgatcggtatctctttcccggcgggttctggtctggtggcatttgcagccgcaacaggcgtaatgccgctggatatgccggaatccgttctggtgcgcttcaaaggcaaaatgcagccgggcatcaccctgcgcgatctggtacacgcgatcccgctgtatgcgatcaaacaaggtctgctgaccgttgagaagaaaggcaagaaaaacatcttctctggtcgcattctggaaattgaaggtctgccggatctgaaagttgagcaggcatttgaactgaccgatgcgtccgctgagcgttctgccgctggttgtactatcaagctgaacaaagaaccgatcatcgaatacctgaactctaacatcgtcctgctgaagtggatgatcgcggaaggttatggcgatcgtcgtaccctcgaacgtcgtattcagggcatggaaaaatggctggcgaatcctgagctgctggaagccgatgcagatgctgaatacgcggcagtgatcgacatcgatctggcggatattaaagagccaatcctctgtgcaccgaacgacccggacgacgcacgtccgctgtctgcggtacagggcgagaagatcgacgaagtgtttatcggttcttgcatgactaacatcggtcacttccgtgctgcgggtaaactgctggatgcgcacaaaggccagttgccgacccgcctgtgggtggcaccgccaacccgcatggacgccgcacagttgactgaagaaggctactacagcgtcttcggtaagagcggggctcgtatcgagatcccgggctgttctctgtgtatgggtaaccaggcgcgtgtagcagacggtgcgacggtggtttccacctctacccgtaacttcccgaaccgtctggggactggcgcgaatgtcttcctggcttctgcagaactggcggctgttgcggcgctgattggcaaactgccgacgccggaagagtaccagacctacgttgcgcaagtagataaaactgccgttgatacttatcgttatctgaacttcaaccagctttctcagtacaccgaaaaagccgatggggtgattttccagactgcggtgtaataagtaagcgcacgcgctgcgcataaacgacacaatgcccggtgaatgagattcccgggcattttttatttctaaaccatcgccgttccgctgtttttctccggtaaggctgcaataattacatcaatagcgcaatgcgatttcggcgcattgccgggagcagaggaacacactatggattacgaatttctgcgcgatattaccggagtggtaaaggtgcgtatgtccatggggcatgaagtggtcgggcactggtttaatgaagaggtgaaagaaaacctggctttgcttgatgaagtggaacaagcagcgcacgcactgaaaggtagcgaacggtcctggcaacgggcagggcatgaatacaccctgtggatggacggtgaagaggtgatggttcgcgccaatcaactggaattcgctggcgatgaaatggaagaagggatgaactactacgacgaagaaagcctgtcgctatgcggcgttgaggattttctgcaggtcgtggcggcttaccgcaatttcgtgcagcagaagtaaataaatctggcggagcctgggagctccgccagagccgttaaacagctggcatattgcgcccgtaataaatctcgcgcatttctttccacagcgcagcggtaatttcctggcgctcgctgtcggttaaatcttccggtttggtgtggaacatgtagtgcttaaggtcgaactctttaagcaacatcttggtatggaagatattttcctgatagacgttcacatccaccatgtcatacagcgccttcatatcgtcagacataaagttctgaatcgaattaatctcatggtcgataaagtgcttcataccgttaatgtcgcgggtaaaaccgcgcacgcgataatcaatggttacgatatcggactcaagctggtggatcaggtaattcagcgccttcagcggagaaatcacgccgcaggtagagacttcaatatcggcgcggaaggtacataaaccgccttcaggatgactttccgggtaggtatgtacgcaaatatgacttttatcgagatgggcaacgaccgtttctggcagtgggccggggtgttctgttttgtcgatgagtttcgggtcaaccggttcttcactcaccagaatagtgacgctggcaccctgtggttcgtaatcctggcgggcgatgttaagaatattggccccgataatggaacaggtttctgacaggatttcggtcagacggttggcattatagagttcatcgatataagcaatataaccgtcgcgctcttcggcagttttggcgtagcagatatcgtaaatacaaaaactcagacttttggtcagattattaaagccatgcagtttcagttttttcaatttcttatcttctccttaggacggctgtgaagccagtgcgtcttgcagatactgaggtaaggcaaaagctgccgtatggattgccggattgtaataacggcatttcaggccagaagcgagaaaacgcgcctgaataatttcggttgagagatggcgtaaggcgtcgttatctgtcgcccatgcaaaagtcatgataccgccgtaataggtcgggatcgccgcctgataaaagccaacgtcgctgaagtaatggctgagtttgcgatagctgtcgatggcttcttcctgctgtaaaaagcagacgccgttttgtgcgacgaagataccgccaggattcaggcaacgtttgcagccttcataaaatgctgaggtgaacagactttcgccgggaccgataggatcggtgcagtcggagataatgacatcaaaggtctggctggtttgattaacgaaattgacgccatcgtcgatcaccagcttaaagcgcggatcgtcgtagctaccggcgttatggttgggcagatactgacggcagaacgacacgatacccgcatcgatttccaccatcgtgattgactcaacgtttttatgtcgggttacttcacgcagcatggcaccgtcgccgccgccgataatcagcacatgtttcgcgtgaccgtgggccagtagcggaacatgggtcatcatctcatgatagataaactcgtcgcgctcggtggtttgtactacgccatccagcgccattacgcgaccaaatgcagcgttctcaaaaatgatcagatcttggtgatcggtcttttcatgatacagaacgttatctaccgcaaagtactgcccaaactggtcgtgtagcgtttcatgccactgttttttttcggccatgggttgatacctcctttgttaacacccgtaaaaaaagggcgcaacataatagctaacattgaccgcggatgcacggtcaatatttctacaaaaaggtatcagggattatttgacgtaggcaagcaggcttaaggaatcgcgggccagggctttgcactttttagcgacgggaatgccaatgccgctgagatcgcggtagctgtcttcaccgagggctttcatgtcgaaggtgtcgtaattactgagatcccactggttttgctgggcgaaaaagaccagtgcgcgacgaatttgcccgttaggtaagttctggtaaccacaatcgttcttcagaaagacaaaaactgccgttaaatcggccatatcttcggcttcagactcgctgagcgcgtaactgtttgcgcagacggccatcaggctgccgaataacactgttctgaaaaacgtcttcattgcttctaccaggggcttaaagaagataaacgttagcacactgcgagcgaggcgacgaccattattgtcgattaaattgtgtctgcggcttgaccttcccgtaaggggaaggactatgctcaacgtttgattttgtttcgcctgcttaagaataaggaaataactatgcaacgtcgtgatttcttaaaatattccgtcgcgctgggtgtggcttcagccttgccgctgtggagccgcgcagtctttgcggcggaacgcccaacgttaccgatccctgatttgctcacgaccgatgcccgtaatcgcattcagttaactattggcgcaggtcagtctacctttggcgagaaaactgcaactacctggggctataacggcaatctgctggggccggcggtgaaattacagcgcggcaaagcggtaacggttgatatctataaccaactggcggaagagacgacgttgcactggcacgggctggaaataccgggtgacgtcgacggcggcccgcagggaattattccgccaggcggcaaacgtacggtgacgttgaacgttgatcaacctgccgctacctgctggttccatccacatcaacatggcaagaccgggcgacaggtggcgatggggttggctgggctggtggtaattgaagatgacgagatcctgaaattaatgctgccaaaacagtggggtatcgatgatgttccggtgattgttcaggataaaaaatttaacgctgatgggcagattgattatcaactggatgtgatgaccgccgccgtgggctggtttggcgatacgctgctgaccaacggtgcaatctacccacaacacgctgccccgcgtggctggctgcgcctgcgtttgctcaatggctgtaacgcccgctcgctcaatttcgccaccagcgacaatcgcccgctgtatgtgattgccagcgacggtggtctgctacctgaaccggtgaaggtgagcgagctgccggtgctgatgggcgagcgttttgaagtgctggtggaggttaacgacaacaaaccctttgatctggtgacgctaccggtcagccagatggggatggcgattgcgccgtttgacaagccgcatccggtaatgcggattcagccgattgctattagtgcctccggtgctttgcctgacacattaagtagcctgcctgcgttaccttcgctggaagggctgacggtacgcaagctgcaactttctatggacccgatgctcgatatgatggggatgcagatgctaatggagaaatatggcgatcaggcgatggccggaatggatcacagccagatgatgggccatatggggcacggcaatatgaatcatatgaaccacggcgggaagttcgatttccaccatgccaataaaatcaacggtcaggcgtttgatatgaataagccgatgtttgcggcggcgaaagggcagtacgaacgttgggttatctctggcgtgggcgacatgatgctgcatccgttccatattcacggcatgcagttccgtatcttgtcagaaaatggcaaaccgccagcggctcatcgcgcgggctggaaagataccgttaaggtagaaggcaatgtcagtgaagtgctggtgaagtttaatcacaacgcaccgaaagaacatgcttatatggcgcactgccatctgctggagcatgaagatacggggatgatgttagggtttacggtataaaaagaccgtattcggaaatatgcccggatctctccgggcattatggttatttcacatcatccggcagggcataagccacaatatagtcgcccatcttcgtaccaaatgaaccgtgaccgcctgcggagatcaccacatactgcttgccattcacttcataggtcattggcgtcgcctgaccacccgctggtaaacggccctgccacagtttttcaccgttgctcatgttgtaagcgcgcaggtagttatctgccgtagcagcgataaacagcacgttacccgccgtggagattggcccgcccagcatcggcatacccatattgaacggcaccggtacaggcatcgggaacggcatactgtcttgcggcgtaccaatacgtttcttccacaccacttcattgattttcagatccagcgccgagatataaccccatgctggctgtttacacggcagaccaaacggtgagaggaacgggttgagcgtgacaccatacggtacaccgtactgtggctgaatgccggattccgtacccgtgcctttggcatctttcggctgctccatcgggttacccggaccgcgtgggatcagtttcgaaacaaacggcagtgccattgggttggcaattgccacttcacgatttggatcaacggaaatcccgccccattcaaacattcccaggttacccgggaagaccagcgtgccctgttcagatggcggcgtgaaaatgccttcatagcgcatctggtggaacatcacgcggcacaccagttggtcaaacatggtggctccccacatatccgcaccgctcaaatctttcttcggacggaagctcagttcagagaacggctgggtcggagtaacgtaatcgcctttcgcagcaccttgcggcaccggtttttccggggccggaaccaccagttcgccattgcgacgatcgagcacaaaaatgttgccggttttcgccggagcgtaaataactggcactttctgaccattaacggtgatgtccgccagcgtcggctgtgccggaagatccatgtcccacaggtcgtggtgaacggtctggtagctccacgccagtttcccggtagtggcattcagcgccagaatcgagctggcataacgttcctgttccggtgtgcggttaccgccccagatatccggcgtggtcacgcccatcggcagatagaccagatccagcttcgcgtcataggccgctggtgcccaggagtttggcgagttaaaggtaaaggtgtgttcgtcagacgggattgcgttcggatctttcgcgccgggatcaaaagcccacagcagctccccggtgttgacatcaaaaccacggatcacgccagacgtttcgcgggttgagaagttatcggtaactgaaccggccatcacgatggttttatcggtgataatcggtggcgaagtcggttcatacagacccggtttggtgtctggcatattgctttgcagattgagcacgcctttattggcgaaggtttcgcacagtttgccgttttcagcgttaatcgcaatcagtcgaccatcattgaccggaagaatgatacgacgcgggcaatccgccatcacttccggcgaagccgtttctgctttggcttcatgataagagacgccacggcaggttacgtgctggaaagactcgttagttttcagctcaggatcgtaatgccatttctctttgccgctggcggcatcgagcgcaaacaggcgctggtgagcggtacacaggtaaagggtgtcgcccactttaatcggcgtcacttcattggtgatttcgcccggatcgttcggctgcttcacatcgccagtacggaacacccaggcttctttcagattatggacgttatcggcgttaatttgtttcagaggtgaaaagcgttgaccttcctgattgcgaccataggcaggccagtcctgatcggcaacgggtgagatagcttccgcaggtgtggcatcggcgcttaaggtgccgttgatttcctgcggatcgttaaatccggcccaggtcaggatactaccgctaatcagcagtgccaccaccagtgcggcaactgcgccgctggcaggaatgaccaggcgacgccagacaaacggcaggatcagccagatgccgaagaagaccagaatatcgctgcgcggagtcagcgcccagaagtcgaaaccaacttcccagacgccccaaatcatggtgccgagcagcagggctgcgtatagccaaagcgcggcgcgtttactgcaccacagcatccaggcgacgccgagcatcacaaggccagcgatagggtagtaccaggagccgccaatcgcgaccagccagcctccgccaatgagtagatacagcccgcaaagcgctgcaaaaagggctgttagcgtgacgagtaatcgtcgcgagcctgtattgttaattgccataaagagacaccatttcaattcattaatattttagtagcaattaattataggttttaacatgtgtgaccgtcatcacaattcgagctttattaacagattccgcgaatgaatagttttactggtatactgcgtgtcttgcgctttgttgcggtgccaaaacctgcccgtgcgaagtgatttgtttttaaatcatatggttagagatatgaaacatactgtagaagtaatgatccccgaagcggagattaaagcgcgtatcgccgaactgggtcgtcagattactgagcgttacaaagacagcggcagcgatatggtgctggtgggtctgctgcgtggctcatttatgtttatggcggacctgtgccgtgaagttcaggtatctcatgaagtcgactttatgaccgcctccagctacggtagcggcatgtccaccacccgtgatgtgaaaatcctcaaagatctggatgaagatatccgtggcaaggacgtgctgattgttgaagatatcatcgactcggggaatacactgtcgaaagtgcgtgagatcttaagcctgcgcgaaccgaagtcgctggcgatttgtacgctgctggataaaccgtcccgtcgtgaagtgaacgtcccggtagaatttatcggtttctcgatcccggatgagtttgtggtgggttacggcattgattacgcacagcgttaccgtcatctgccgtatatcggcaaagtgattctgcgggacgagtaagtgtgaagttgccggatgtgttgcatccggcatggcatttttatttgtggttggcgtgtttcagcttgaggttggaaatcccgtgacggtaacgttgctcaagggtttcgcggttggtcgctgtgacatccagatcacgcagcaagccgtcgtgaatgccgtaggcccagccgtgaatggtaactttctgcccgcgtttccacgctgattgcataatggtggagtggcctaggttataaacctgttccatgacgttcagttcacacaaggtatccagacggcgctcttgcggcatttcgccgagcaatgagctatgtttgaaccagatatcgcggatatgcagcagccagttgttgataagccccagttccgggttttcaacggcggcttgtacgccgccgcaaccgtagtggccacagataataatgtgttcaacttcgagtacatccactgcatactgaaccacggaaaggcagttcaggtcggtgtgaatgaccaggttagcaacattacggtgaacaaagagttcgcccggctcaagaccggttaaacgttctgcaggaacgcgactgtcggaacatccaatccatagaaagcgcggtttttgcgcttgtgccagtttctcaaaaaacccgggatcctcttccaccagcatttttgaccatagtgcattgttgctgatgagtgtatctatgtctttcatggaggttaacgacctgtaaccaaataattacgtttggctaatatagggcaactccgggacgatttaaaccacagataaagtgtaagaacgtaaggtaagtaaaaatttatgaccattgcactggaacttcaacagcttaaaaaaacctatccaggcggcgttcaggcgcttcgtggaatagatttgcaggtcgaagcgggtgatttttatgcgcttctcgggccgaacggggccgggaaatcgaccactatcggtattatcagctctctggtaaataaaacctccgggcgggtcagcgtatttggttacgatctcgagaaagatgtcgtgaacgctaaacgtcagttgggactggtgccgcaggaatttaacttcaacccgtttgaaaccgtgcagcaaattgtggtgaatcaggcagggtactacggtgtggagcgcaaagaggcgtacatccgcagcgaaaaatatcttaaacaactcgatctatggggaaaacgcaacgaacgtgcgcgtatgttatctggcgggatgaagcgccgtttaatgattgcccgtgcgttaatgcatgaacctaaactactgattctcgacgaaccgaccgcaggcgtggatattgaacttcgccgctcaatgtggggctttttgaaggatttaaacgacaaaggcaccaccatcattctcaccacacactacctggaagaagcagaaatgctgtgccgcaatatcggcattattcaacacggtgagctggtggaaaatacctcgatgaaggcgctgctggcgaagctgaaatcggaaacctttattctcgatctcgcaccgaaaagtccgttaccgaagctcgatggctatcagtatcgactggtcgataccgcgacgctggaagttgaagtgctgcgtgagcaggggatcaacagcgtatttacgcagttaagtgagcagggcattcaggtattaagtatgcgtaacaaagctaaccgtctggaagagctgtttgtttcactggttaatgaaaaacaaggagatcgcgcatgatgcatctttactgggtggcgctaaaaagcatctgggcgaaagagatccatcgctttatgcgtatctgggtgcagacgctggtgccgccagtcatcaccatgaccctttactttattatcttcggtaacctgattggttcgcgtattggcgatatgcatggcttcagctatatgcagttcatcgtaccggggctgatcatgatgtcggtgatcaccaatgcctacgccaacgttgcgtcatcattttttggtgccaagttccagcgtaatattgaagagctgctggtagcgccggttccgactcacgtcattattgccggatatgtcggcggtggcgtggcgcgtggtctgtttgttggcattctggtgacggcaatttcactgttttttgtgccgtttcaggtgcattcgtgggtattcgttgccttaaccctggtgctcacggcggtgttgttctcccttgcgggtttgctgaacggtgtgtttgccaaaacgttcgatgacatcagcctggtgccaacctttgtgttaacgccactcacgtatttgggtggggtcttttactcactgactttgttgccgccgttctggcaagggctgtcgcacctgaacccaatcgtttatatgatcagtggtttccgctacggcttcctcggtatcaatgatgttccgctggtcactacctttggcgtactggtggtctttattgtggcgttttatttgatctgttggtcgctgatccaacgtggacgtggtttgcgtagctaaggctatttcctctcctctggatttgggggagaggagttttgacggctatcaccctttatcaacaatggtcagggtagactgattttcggctaaggaggaaggcgatgttaggttgggtaattacctgtcacgatgaccgggcgcaagagatactggatgcgctggagaaaaaacatggggcgcttcttcagtgccgggccgtgaatttctggcgtgggttaagctctaatatgctcagccgcatgatgtgcgatgctctgcatgaagcggactctggtgagggtgtcatcttcttaaccgatatagccggagcgccaccgtaccgcgtggcttcattattaagccacaaacactcccgttgcgaagtgatttctggtgtcacgttaccgttaattgaacagatgatggcttgccgtgaaaccatgaccagttcagagtttcgcgagcgtattgtcgaactgggtgggccggaggtgagtagtctttggcaccaacaacaaaaaaatccgcctttcgtcctcaaacataatttgtatgagtattaacccacgattcttatagcgcttttgctacaataaaagcgttgtttcaccctcggttattttttcatgtacaaacaagctgttattctcctgctgatgctgtttaccgcaagtgtcagtgccgcgttacctgcccgttatatgcaaaccatcgaaaatgctgcggtctgggcgcaaattggcgacaagatggtgaccgtggggaatattcgggccggacaaatcattgccgtggagcccactgccgcaagttattacgcatttaattttggctttggtaaagggtttatcgataaagggcatcttgagccggttcaggggcgacaaaaagttgaagacggtttgggtgacctcaacaagccgctgagtaatcagaacttagttacctggaaagatacgccggtctataacgcgccgagtgtgggcagtgcgccatttggggtattggcggacaatttgcgctacccgattttgcataaactgaaagacaggttaaatcaaacctggtatcaggtccgtattggcgatcgactggcctatatcagcgcgctggatgcccaacccgataatggccttccggtgctaacttatcaccatattctgcgcgacgaagaaaacacccgttttcgccatacttcgacgaccacctcggtacgcgctttcaataaccaaatggcctggctgcgcgacaggggatacgcgacactgagcatggcgcagctggaaggttacgtgaagaataagatcaatctccctgcgcgagcggtggtgattacctttgatgatggcctcaagtcggtgagccgctatgcgtatcctgtattgaaacaatatggcatgaaggcgacggcgtttgttgttacctcgcgcatcaaacgtcacccgcagaagtggaacccaaaatcgctgcaatttatgagcgtttctgagcttaacgaaattcgcgatgtttttgattttcagtcacatacccattttttgcatcgggtggatggctatcgccgacccatattactgagccgtagtgagcacaatattctgtttgattttgcacgttcacgccgcgctctggcgcaatttaatccgcatgtctggtatctttcgtatccgtttggcggatttaatgacaaagccgtgaaggcagcaaacgatgccggatttcacctggcggtgacaaccatgaaaggcaaagtaaaaccgggggataatccgttgttactaaaacgactttatatcttaagaacggattcgctggagacgatgtcgcggctggtgagtaaccagccgcagggataacaatcaagcaacctgtaccggaatcgctttcgcggtacgtttcatttcattgtcgccttcaaaataggcgacgttgggtcgccaggtgcgagcttcttcatctggcatggtaacgaagctggcgatgatgacaatatcgccgacactggcgcagtgggccgccgcaccgttaacagaaataattctcgaaccgcgttctgccgcgatggcataagtggagaaacgcttgccgttggtgacattccagatatcaatggcttcgttttcgagaataccggctgcgtcaagaaaatcctggtcaatggcgcaagaaccttcatagtgcaggtccgcatgagtcactttcacgcggtggagtttgccctgcagcatcgtgcgaatcataacttctacctttctaccctgtcgttaacgaagcaggcgatgcctgctttgaggaaattctcacgcagtattgcccgatttttgtttagtgtctactcatctgacggcatttacatcagcagtttgcgtaccgtgccgaagcgtgccatgtaacggctgtaaccaattgaaatttctctgaacgctgctcggtaaacactaaagaggtggctgacgatggcacgccttgactggatactgccttcacgcaagacaacacggaaggcagggaagatggatgcaccgagtaccacaccgcatgatgcagtgtttaaacaatttttaatgcacgcggagacggctcgcgactttctggagatacatttgccagtggaattacgagaactttgtgacctcaacacgcttcatttagagtcggggagtttcattgaagagagcctgaaaggacacagcacggacgtgctctattccgtgcaaatgcagggcaatcccggttatctgcatgttgtgattgaacaccaaagcaagccggataagaaaatggtctttcgcatgatgcgttattctattgctgccatgcaccggcatctggaggcggatcacgataagctgccgctggtggtgccgatactgttttatcagggcgaggccacaccttatccgctctcaatgtgctggtttgatatattttactcgccggagctggcacgacgcgtctataacagtcctttcccgctggtggatatcaccatcacaccggatgacgaaatcatgcaacatcggcggattgcgattctcgaactactgcaaaaacatattcgccagcgcgacttaatgttattgctggagcaactggtcacgctgattgacgaagggtacactagcggaagtcagttagttgccatgcaaaactatatgctgcaacgcggtcatactgaacaagcggatttgttttatggtgtgctgagagacagggaaacgggaggggagtctatgatgacgctggcgcagtggtttgaagagaaagggattgagaaggggattcagcagggaagacaggaggaaaggcaagaattcgcccagcgttttctgagtaaagggatgtctcgggaagacgttgcagagatgacaaatttatctcttgctgagattgataggctgattaactaagttgtctgcgttatgaataattgcttacagacgccatcgccatgacgtggggcaaattaataattggcgccatcagccgtagcgccagttatactcgtcatactttaaattgcatgtgctgcgtctgcgttcgctaaccccagtcacttacttatgtaagctcctggggattaatgagagacatccatgtctctcaccgaaggccagcctgcggctgggcaaattcgttcctgacgaatttgtcactcgcttgccgccttcctgcaacttgaattatttagagtaaaagcattacgccagttcgacgattttgttgtcgatcaggcgggcatcgccaagccaggcggctaccagaattacagctcgtttgctggtttcagagacttccagcaacgtgtcggcatcgcgaatctgaatatcatcggcgcggaagcctttttcattcagttcttgccctgcaatggcaataatttcatcaagatcccgctcgccagcctgcaatttgtcggcaattgaacttaaaactttgtacagaccgggcgcaattttgcgttgttccgccgtcagataaccattacgggaactgagcgcaaggccatctttggcgcgcataatcgggacgccgacaatttcaatatcgaagcccatatcggcaaccattttgcggattagcgccagttgctgaaagtccttttcaccgaagcaggcgatgtccggctggaccaggttaaacagcttgctgacgatagtcgaaacgccgcgaaaatgccccggacggctcgcgccttccagcatggtcgaaagcccgggaacgtcaacgtaagtatgggtttcagtaccgttcgggtagatctcttttaccgaaggggcgaaaactaaatccactttacgtttgtttagcttctcgcagtcctcctgcaaggtccgtggataacgtgccagatcttccgggcggtcgaactgcatcgggttaacgaaaatactgacgacgaccacatcggcgcgggctttggcttcgtcgaccagcttcatatggccatcgtgcagattacccatagtaggcaccagcgccacgcgcttgccttccatacgcaggcggcgaatttgctgacgcagcagcggcagggtttcgataattaacacaacgtgactccttaatggaaactgtgttcttcgcccggataaacgccggactccacttcagccatatactgccgcacagccgcgcggatgtcgcccgtttcggcgaggaaatttttagcgaatttaggaatgtgaccgccggtaatgccgaaggcgtcgtgcatcacgaggatctgcccgtcagtgacgttgcctgcgccaatgccaataaccgggatcgccagtgcttcggtaatacgttttgccagttcaatcggcacgcattccagcaccagcagctgtgccccagcggcttctaaggctaatgcatcgctgagcagttgatcgcccgcttcatcgccgcgcccctgaactttgtagccaccgaaaatattcactgactgtggggttaaacctaagtgaccacatacaggaacggcacgttcggtcagcatttttacggtttcgaccagccactcaccgccctcaattttgaccatattggcaccggcacgcataaccgttgcggcgttttcaaaggcttgttccggcgtggcatacgccataaacggcaggtcagccaacagcaggcagtttggcgcaccacgacgtacggaggcagtgtggtaggcgatatcggcaacggtcaccggcagggtggagtcgtgaccctgaaccgtcatgcccagcgagtcgcctaccagcatgacgttaagtccttcatcagcaaatagtttcgcgaagctgtagtcgtaagcggtgatggtcgcgaaacgctttttatcctgcttacatttctgaagtgaagcaatggtggtcggtttcataacgtgtcctgataaatgatgtcgtgttgcctggcattttatcagtcacattggtgggggcaatgatttatcaattaccgcaccgccagatgatggcggtgcggtggacttattaagggtaggttacctggaaagtactggtggctttaaactcaccagcttctattggtatagttccatcctgttgtagcgtggcctggaaatggagagggtatgttatacctgtatcttgatccgggtaaactcctcctgttgtatcgtctttgcctctcgggtcgtaatctttataaacagaatttgaatcattaggtttcaatgtcattagaggatttttactagttgctaaaccttctatgagtacaccgactccttttgctgcgtcattacctgtgagagtattaccaaggagttgcccgttttcagtaccaacctttgttgaaactaattttgtctcaatattagtcacacgaacgcagttttgaagtgaaatatcaaaaggaaccggtgtggcaccgtttctgatttgttctgcactatattcacccatttttaccgtagaaccagtcacagaagttccactaagcggtgatgctgccaacttactgatttagtgtatgatggtgtttttgaggtgctccagtggcttctgtttctatcagctgtccctcctgttcagctactgacggggtggtgcgtaacggcaaaagcactgccggacatcagcgctatctctgctctcactgccgtaaaacatggcaactgcagttcacttacaccgcttctcaacccggtacgcaccagaaaatcattgatatggccatgaatggcgttggatgccgggcaactgcacgcattatgggcgttggcctcaacacgattttacgtcacttaaaaaactcaggccgcagtcggtaacctcgcgcatacagccgggcagtgacgtcatcgtctgcgcggaaatggacgaacagtggggctatgtcggggctaaatcgcgccagcgctggctgttttacgcgtatgacagtctccggaagacggttgttgcgcacgtattcggtgaacgcactatggcgacgctggggcgtcttatgagcctgctgtcaccctttgacgtggtgatatggatgacggatggctggccgctgtatgaatcccgcctgaagggaaagctgcacgtaatcagcaagcgatatacgcagcgaattgagcggcataacctgaatctgaggcagcacctggcacggctgggacggaagtcgctgtcgttctcaaaatcggtggagctgcatgacaaagtcatcgggcattatctgaacataaaacactatcaataagttggagtcattaccccactaagcatagcggtaaaacaagtgggattagtcaacttgacattgagcagatcgaaatcgattttgataaaataactatgctcatttataccttggcctgcgccataggctttaaatgaatacagataatttgatgagctggataatttgatctgttgagttactgttggatcaaagtttgtatctgtatagaattcaattgtaagggtctgataaataccacctacagcccagtatttacgggtgctattcgcattattgcaactccaatataacacgtcttcgcttggattataccacgaaaaatattgttctgcagagtcaccaatgtatatcccaggtgaactaacgttagttacggtaccgtaagctgaccacatgtttgaaattaataatgtgtaatacaaaccaggaactgatgtattaaataatttatgggagccatacattttacctgagtcaaccattgcattttcaatacgcattgcgctaccacttgtgctatcacttctgttgcaataaagaaaaccaccaccagaagcggtatctaactgactccactgtaattttacacctgtaggtccaagctgcgtcggtttgtagaaaactaaattatttgtacttgttgcatatctgaatatgacagtagcatcgccattcggccccgtttctctccatttttgatctgacggaccaacgccgtaactattcccaacaatatatcctacgttatcatcagtgccagcactcgcggtataacaactcaagcacagaattaaaaaaaatgtctgaagaatttcttcattatcactccaccatctactgctgtaacagtcgcagttatttgttttgatctattattcgtagtacacatcaactaatatatgactcattacttggccagatatgacatccagcgcgggatcgattttttgcattctggcataaaatttccatgaagaattatgcagggcagaagtcattactggatacacggaacgagaatttcctgctgaactaataacattgaatatattggtcgggtcctgaatggaaaagagaacgacaccgacatttttagccccggttgcgacttcattggcaaatatttgccttgaacctgcagccatgacaccgctaagggctctaaaatcaatatgtaactgattaagcacatcgccagttccctgtaatgcacagtctgatactgtgacagtgaactcttttccacctggttgatagctttcaggagtaacattatctgaaaaatatcccaccccaacgacgccaagatcaatattaccctggttactgattccgcttttgcaagtgctgttttttacattggcaacaaggtcaatatcctgcccagcgatggctggataggtaatgggaaactgtagtgacagaaacagaattattctcttcatcagcttacgttgagtgggatgcatatatagttcctggatctgtcagtctgttagttataggttactgtaaatgtggcaggtgcagaaaatttacccgcagtgacattgcttacggttttatttttttcgacgaccagtcgagcactcatcggataataaacaaccgcgttggctgcattggagatagtgacctcttgagatgctggtgtcacacaactaaattgtgttgcgctccctgttgccggagtttcggtgctccagacttcaacggcgacggcacttgctttatctgcggctgtggatccatttgcgagccccgcaccgtcattagcagtaccttcgcatgtggctcgcttggttaattttatttgtgcttttttattggggatacccgcacagtctttgaatttgagtttgaatgttttaactttggtcttggcattgatttcagaaatatatacatcgccaaagtcaacaacagaaatgtcctgatcagagtcatttactaatgtagcggtacaagtacctatttctacggtagtaatcacggtcagcccaatgctgtctgttgccgcataagagggtacgctgaacaatgaggcagccaaaacgacactgctggataatccataacgtaaatttttaaatgtcatcttaattatccttcttattgatagatgaaattaaacgttgccagtgcacgaaaattccccggtacgccttgccctgcatctgtttcacgtagcgcaacggtcatttcaagacccttatcgggctgcatctcgtctgtgctccagcgtatcttttccgcactgttaggtttaaggaaagtggcatcatcagtagtccgttttttgaaacccataccgatattacttgtcgtcgaagatgaatcaccagactgcggtataataagcttaggtgagcttgatgatgcatttccggtcagagtggtatcaatccaactgatgccactgctgcacccactagcaaccagtttaaaatcagcctgagattctgtcgttttattcgcgatcttatccagacccatcttagggattctcaatgtgtagttattattgccatcattcgtgacgttattaccagtaagtgtgatgttacaggttgtcgctttgtggatttgcccctatatttccagacatctgttatcacttaacccattacaagcccgctgccgcagatattcccgtggcgagcgataacccagcgcactatgcggatgccattcgttataatgctcgaacgcctctgcaaggttctttgctgccgttaacccgtctggtttgggcatgatactgatgtagtcacgctttatcgttttcacgaagctctctgctattccgttactctccggactccgcaccgccgtgttcttcggttcaagtcccaacatccgggcgaactggcgtgtttcattagcccggtagcatgaaccattatccgtcagccactccactggagacgacggaagatcgttgccgaagcggcgttccaccgctcccagcatgacgtcctgtactgtttcactgttgaagccgccggtagtcaccgcccagtgcagtgcctcacgatcacagcagtccagcgcgaacgtgacacgcagtctctctccgttatcacagcagaactcgaacccgtcagagcaccatcgctgattgctttctttcacggccactctgcctgtatgtgcccgtttcgatggcggtacagcaggttttcgctcaagcaacagcgcattctggcgcatgatccggtaaacacgtttggcattgatcgcaggcataccatcaagttctgcctgtctgcgaagcagcgcccatacccgacgataaccatacgtgggcagctctccgataacatggtgtatacggagaagcacatccgtatcatcagtgtgacgactgcggcggccatccatccagtcatcggttcgtctgagaatgacgtgcaactgcgcacgcgacacccggagacaacggctgactaagcttactccccatccccgggcaataagggcgcgtgcgctatccacttttttgcccgtccatattcaacggcttctttgaggagttcattttccatcgttttcttgccgagcaggcgctggagttctttaatctgcttcatggcggcagcaagttcagaggcaggaacaacctgttctccggcggccacagcagtaagacttccttcctggtattgcttacgccagagaaataactggctggctgctacaccatgttgccgggcaacgagggagaccgtcatccccggttcaaagctctgctgaacaattgcgatcttttcctgtgtggtacgccgtctgcgtttctccggccctaagacatcaatcatctgtactccaatgactagtctaaaaactagtattaagactatcacttatttaagtgatactggttgtctggagattcagggggccagtctactttgacagtggctgtaaactctacattaatatccgttgcaaatactgatggtgataataatattcccatcagtatcgctattttatgtggcgttatttttatcatttgacgttccttgtagttactgaatctgacaccgaattccattcagaataatagattgcgggtgatgctgccaacttactgatttagtgtatgatggtgtttttgaggtgctccagtggcttctgtttctatcagctgtccctcctgttcagctactgacggggtggtgcgtaacggcaaaagcactgccggacatcagcgctatctctgctctcactgccgtaaaacatggcaactgcagttcacttacaccgcttcccaacccggtacgcaccagaaaatcattgatatggccatgaatggcgttggatgccgggcaactgcacgcattatgggcgttggcctcaacacgattttacgtcacttaaaaaactcaggccgcagtcggtaacctcgcgcatacagccgggcagtgacgtcatcgtctgcgcggaaatggacgaacagtggggctatgtcggggctaaatcgcgccagcgctggctgttttacgcgtatgacagtctccggaagacggttgttgcgcacgtattcggtgaacgcactatggcgacgctggggcgtcttatgagcctgctgtcaccctttgacgtggtgatatggatgacggatggctggccgctgtatgaatcccgcctgaagggaaagctgcacgtaatcagcaagcgatatacgcagcgaattgagcggcataacctgaatctgaggcagcacctggcacggctgggacggaagtcgctgtcgttctcaaaatcggtggagctgcatgacaaagtcatcgggcattatctgaacataaaacactatcaataagttggagtcattacctagattgcgctattttttctgcttctgaactttgttgataatgcgcaagacaacttacgggtttactttcttcgagccatttaatgctgatatttccctgctgctcaatgccacgaacaaatgcttgtccaccctgtccaacattaccaatgacattgccttgctcatcataaatatctgcagcaaatggaatatttttaccatcacttcgtgtgatgttcataatggctgattgcccttgcacggtttcaaaatcagcaaagacgactgaaccctgacgcggtacagctactgcactggtactttttaattcaacatcgttctcaagatcgttgatatccagcgcgatacggttttcatgataaggagaaagagcgctggtgacaccataaccccatcgatcgatagtactgttgccataatttattcgcgctccttgagcacctggagcctgaactaccgccagtgtatcggagtcgctaaaactgtcattactgaaggtcaggccgccgctatgcaatacaaaaccaccgtcggtgctgagagacacttgacgactgttatcgctatttgcagaaactgaacctgccagggttccccacggtgattcatagctggcataacccccaacataactcaaatctttgctggctttattcatcgtatagccagtatttacgctataactgacgcgagcgttatcactatagccactgctactgacgttgagttggttattacccttaaagtcactgctcatttgagtatcaatactctggaaacctgaagtccgttgttcagtgccaagtaatttttcaataggaatggtgaaactgagataaacgctatcgtcagtgtcgccgtcttcattccatgaacgctgggcactgacactgtagctgccccaggatgcactgttactgtagccaatagagtaattgctacgattttgtccggaagcccagtaatcgggtaatgactccaacttattgatagtgttttatgttcagataatgcccgatgactttgtcatgcagctccaccgattttgagaacgacagcgacttccgtcccagccgtgccaggtgctgcctcagattcaggttatgccgctcaattcgctgcgtatatcgcttgctgattacgtgcagctttcccttcaggcgggattcatacagcggccagccatccgtcatccatatcaccacgtcaaagggtgacagcaggctcataagacgccccagcgtcgccatagtgcgttcaccgaatacgtgcgcaacaaccgtcttccggagactgtcatacgcgtaaaacagcgagcgctggcgcgatttagccccgacatagccccactgttcgtccatttccgcgcagacgatgacgtcactgcccggctgtatgcgcgaggttaccgactgcggcctgagttttttaagtgacgtaaaatcgtgttgaggccaacgcccataatgcgtgcagttgcccggcatccaacgccattcatggccatatcaatgattttctggtgcgtaccgggttgagaagcggtgtaagtgaactgcagttgccatgttttacggcagtgagagcagagatagcgctgatgtccggcagtgcttttgccgttacgcaccaccccgtcagtagctgaacaggagggacagctgatagaaacagaagccactggagcacctcaaaaacaccatcatacactaaatcagtaagttggcagcatcaccacccgttagatagttattcagaccgtagtagtagctggcctgaaataaattaggctcatcctgaatatcatcttttaagacctggccgccgctaatatcccaacgtccaacgccagggcgtaacatttgaacgaccgatgaaaaaggttgcgagaatgtccgctttgagccatcggattcttcgacagtaacaataagatcgctgccgtaacctgacggactcagatcatcaatgacgaaagcgcctggcggcacagtcgtttcataaatcttatagccaccttgcgtaatagtgactttggcgttggtattagcaacgccatgaatgataggcgcaaaactcgctaatgtcggaggcaacatgcggctgtcgctgtataaacgaatgccgcggatactgacagaatcaaaggtttcgcccgttgtataagactcaccaagaatgagttgagaacgcagcgaggcgatatcacgctgtatataccgattcttaaaatcataattactgccagaatcggtcatccagttgtagttgcctgaggcacgcagtcgccatgcacctaaattcatcccaccgttaaaagcagcataaatgctgtcatttcttcgaccaggagtttcactatgatatccgttgaggttgtatgacaacatggccgcattaatgccattttcccataacgatggatcaacatagttttggtaatttttcattacccatgcctgaggaacgtctatatccagacgttgctcgttaacgtcataacgaacagaagcctgagggataatttccgtcaaattaaggcaattgccgagtgtttcatccctggcaagcagaacggctttttcgttatttatatcgggagaatttatatgaaactgcaataaattcttaagtgtgatacaggcttgtgcgttttttttccttcaatttcaataaatgtaatgctttggttaataataggttgatcgttgacataaacactgacgtcgtacatacccggtatagcagggttaccttcactataccggctgagatcaatatttgaggcattctgccccatcaggaaggtatggtcatattcaacaagttcagcacagaaagcactattgcaatacagcagcgcgcaaaacgtagcgatacgggtcagatgattatgataatttttagttggttttatagtcacgttatgcttcctgcggaattatatccttgcctgattacagactggcattaccttcaatggcgccaccaaaatcattaatggcgtaaaaatgtacttttgcagaacttgctttgccattaaggccagtgactttcatgacctcatcactaaatggtgcaatcattttcacatcaatcggatagcgtttaccgctagcttctaaatcaccactgctaaaagagacgtagtaaggggttggattggtcactcgcaatgacgccttaccttctgaacctgaccagaaccacttcagggctaacggggcttcagagggatttcccttcaatccatccgggcgatagaaaagttttatacgtgtgcgaaatgccagttgcagcagactttgattcgcgaccttttctgcatctggttttggtggaacttccagtacgttaaaccagaacacgctctctctgtctttaggcagtgaggtgctggctgtgtacattaatttgattgtttgcccacgtttggcatcaatacgcgatactggcggcgtggcagtaaaagggactgtaatactgccaggctcagcgttgttatcgccagtatctaaccaactctggacaagcaacgggttattccctttattttccagacgtacgttgacacttttttgatcgcttttatatattacgcgagtacccgaaatgacaatgtccgcaatagacgatgaactaaaagccatacaggttacgaagcataaagctgttgtatgtttggtgttaaaaaacataaaccatccctgacagagttaattaaaacagggaataatataaaaatagaaattattaacactattccctgtatattcattcaatcaatttaattggtgaatacttactgataagtaatggtgtatgcagtgttagtttttacataaccagcagttgctgtttggtctgcgacggcacgaacgtaagacgctttaaaatcataaacagcagattttgtcgttgcatccagggctttagtatacacatcgccagggttgttaatttgaacctgtttgatagtggaaccatcaatattgtgcagagcgatattcacgccgtcagacgggttgttaatagacatgtcgttgttcagcgttcctttgctattaccaaagaaaacagaaccgaaggtcattttagctgtactacctggattcggatttgctttgctgcagtcaacggtgatgctgaaaggtttggctttagcgccaacggtgtcattcagcacgccagcatcgatttcaccaacagttgcagtttgcagcaggatcagaccatctttattaccgccgtcaacgcgggtttcacaggtgttatcaacaaccagaccactgatatttaactgaccaccatccatatcagcagaagcagtacctgcaaccattgccagcataagaccagacagggcaaaacctaattttttagacataaaaatccttgaataaaattccattagtcagactactggtttgaagaatgactattcatgacacaaatgttataagcagatgctagatattaatgagcaatgatatttgttaccaaaatttacaaccattgttcattaggacgcctattgtgcactttaagggcttttgaacaaattaaattttcttaattcaaaattaagcaaaaataaattcacaagtgcaattggttagggtatggcgatgggattgatatttatctgcgggaatttatattatgtttctgcaaaaatgtttaaactaaaatttttattaaggaaagagaggatgtatgattttcagaaaatatttatattcgtaatataaataaattaccatttgcttaattcgtcaaatgctcttgtatgtaagacttcacgcaacgtctccccatcaggaaacgccagctccggtgcaatctcaaacagcggccacagcataaatccacgattcttcatatcgtagtgcggaacggtcaggcgttcggtatttatcacttcattaccaaacagcatgatatcgagatccagcgtgcgtggtccccagcgttcagctttacgaacacgaccctgttgcagttctatgcgctgtgtatggttgagtaactcttccggggcgagcgaagtttcaagcgccacggcggcgttgaggtaatcgggttgatcttgcggccccagcggtggagtgcggtaaaacgaagaaacggcaagaatgtggctttcagggatatcgcctaatgctttcagggcagcattgacctgctccagcggagaggccagattgctgcctatggcaatatacgccactgtcatgcggtaccctcacgacgcggtgcgcgtttgcgtggacgacgagtacggcgacgcggtgacggctcttcatccaactcgttaagcatccctttttgatctggtggcgcggaaacctggaactcaccccaccatttcaccagacgctgcagttcagcgttacgttcaacttcagctcgcaaggccaacaggtcataagccgcacggaacttaggatgctccagcagtttccatgcgcgtttaccctgacgtcgggacatacgcaactgcaactgccagatatcgcgggttaacgtcgtcaggcgtttcgggattgccagtgaacggcaggcttcgtccagcacgtcgttcatcgccagcgcgaaagcgtcgtgataggtcaggccgctttcctgggcgatcttctgtgccgtctccagcagtgggtaccagaacatggcggcaaacaagaacgccgggttcacgcgcatatcgttatggatacgcgtatcggtattcttcagcacctgttcaatgatccgctccatcgggctgtcgccattttccgtgaagtagcgggtaatggtcgggaacagcggctggaacagatgatattcacacaacagcttataggtttcgtaaccgtagcccgcttgtagcagtttaagcgattcttcaaacaggcgtgccggtgggatatcgttcagcagggtagcgaggcgagggatcggttctgcggtttccgggctgatgcgcatacccaatttggcggcaaaacgtaccgcgcgcagcatccgtaccggatcttcacggtagcgcgtttccgggttaccaatcagacggataacgccgtccttcagatccttcataccgccaacgtaatcacggacggtaaaatccgctacgctgtaatagaggctgttgatagtgaaatcgcggcgctgggcgtcttcttcgatggagccgaaaatgttgtcgcgcagcaacatgccgttttgcccgcgttgggaggtcgtgcggtcgctgacgttaccttcgtggtgtccacggaaggtcgcaacttcgataatctccgggccaaacattacatgagccagacggaaacggcgacccaccaggcggcagttacggaacagtttgcgcacctgctcaggcgtggcgttagtggttacgtcaaaatctttcggctttttgccaagtaacaggtcgcgcacgccgccgccaaccagccaggcttcgtatcccgctttgttgagcctgtacattaccttcagggcattttcactgatatctttgcgggaaatagcatgctgctcacgcgggatcaccgtcacctgtggacgggcgactgcctgttcagcctcgctttcctcgcggcttagcaccttgcggcaaaaattagcgactcgggtaaaaatagtacacctcggtagtgtcaaacatcattcaggacaaaaaaatagcggctaatcatagctcagcatgacgcatttgagaatgttgaatttacaattgccgactcgggcacggcggtcagcgtccagtttttgactgctgactgaaggatttgttcgacgctgaaatcctgccagtgtgcttctgcctgctgacccagaaattgaagtgccgcgattagtaccggacgtggatcgcctttcggcaacgcaggcgcatgattctgcttggaaagtttagcgccttgtggattaagcgccagcggcagatgaatgtaatctggcactttccagccaaaaagctggtacagcgagatttgccttactgttggttcaatcagatcagccccacgcactatttctgtaacgccctggaaatgatcatcaaccacaacagccaggttgtaggcgaacaacccatcacggcgatgaatgataaaatcttcccgtgccagtttttcgtcggcgtgaataatgccgcgcagctggtcagtaaattgcgtgaccggatgctgctggcggatacgcactgcggcattgtctggtccatgatgcaacacccggcaatgaccgtcgtaaataccgccaatgctttgaatacgcgcacgcgtacaggtgcagtaataacttagtccttgttcatgtaaccaggcgagtgcttcacgataggcgtcgtgacgttgcgattgccagagaacatcgccgtcccagtgcagaccgtaatgttccagctggcgcaggatagtttctgcggcaccgggaacttcacgaggcgggtcgatatcttctatgcgtaccagccagcgaccttgccgggcgcgagcctgcaaatagctgccgagcgcggcgatcagagagccaaaatgaagctcgccggaaggagagggggcgaagcggccaatatactgtgtgtctgtcatctctttgaacaaaaaataaggcgggagcatttcccgcctgtggtaaacgtgatggaacggctgtaattagccagccatctgtttttcgcgaatttcagccagcgttttgcagtcgatgcacagatcggctgtcgggcgcgcttccagacggcgaataccaatttcaacaccgcaggattcgcagtagccgaaatcttcgtcttccacttttttcagcgtcttctcgatctttttgatcagcttacgctcgcgatcgcggttacgcagttcgaggctgaactcttcttcctgggctgcacggtctaccgggtccgggaagttggctgcttcatcctgcatatgtgtaacggtgcgatcgacttcatccctgagttgattacgccatgcttccagaatacgacggaagtgcgccagctgggcttcattcatatactcttcgcccggcttctcctgatatggttccaccccagcgatggcgagaatactcagggacgatgttttacggttttgcccttcttgcatgttgcttctccttaacacgcactatcgatccccatgttcgggggaaaaatgaggccgctataaatagcagatgcttttccggatagcaattatctaaacgtaacacttgacaactgtgtgaggaaaagcgtatttgcgcacgcgaccagaatgtaaattaaccagttacttactttactacaatgtaaccgacagtgattttttaagagccatgccttcagcagaaatttccgctttgtaagccagaatttctacccccctctgttgagcttctgacaatagttgcgcgtatttctcatcgatgtggcgcgcgggtgaaaaccgtgtaatggctgaatgcagcacggcgaaaaagataaccgcacgctggccttcagccgctacgttcatcaactcccgaaggtgtttctgacctcgttcagtgaccgcatcgggaaaatatccctgttcgttctccgctaacgtaaccgatttcacttcaatatagcagtctggacgcgaatccgcctgcaacataaagtcaatacggctgcgttctgcgccgtattttacttcgcttttcagcgagctatagcctgacagttctgaaattgattcattaaggatagcctctttcgtcaacctgttagcccaaagcgtattgacgcaaataaatgcgccgctctggctttgagttagttcccaggtgtgtgggtatttccgtttggtgttgtctgaagtcgaataccagacggtatcgccacgcgttgcacaaccggtcatcgcacccgtattcgggcagtgtagcgttaattcgcgaccatcgggtgtgatcacatcggctaaaaaacgtttgtaacgctgaattagcgtcgcgcgctgtagagggggagagaattccattgcgacaatccttgttattgcgttagcgcccagcgttttagcggcgtgtagcgtgtgcgtccacgggcaaacgaggaggcgtaaagggtgaactccgtcaccgcataagaccagttaaaacctggcggcgggattgtcaccgcctcgctggcgtcgcgcaataaggtaatatgtggatgaaacggacgattgctttgaaaacaaccgctgcgggcagcctgtgaacggagcatattcgccagctggattaagccgcgtggcggctgacgcatccctaaccacaccacacgcgaacgcagccattgtccggcgtcatcaagcgtgagtgtgaaaccaggttgacgaatccgtccggctaaaagagaaagcgccttctctttctcggcgctcacttcgcctaaaaatgccagagtcagatgcaaattatcggcggcgaccggacgtcccgcctcaggtgggaagtgtgtggcgcgccagtggataatctgttcgcggatttctgcaggtaagtcgatagcaaagaacagacgttgcggttcagacatgtgaggcactcggttatgaattaccgcgatgctacaatgtggcgcgaagaatgttaaccctctggagcgttttgtgtcgtcgttgcccgttgctgccgtcttacctgaattacttaccgctctcgattgtgcgccgcaggtattattaagtgcgccgaccggggccgggaaatcaacctggctgccgctgcaactgctggcgcatcccggcattaacgggaaaattatcctgctggagccgcgtcgtctggcggcgcgtaacgtcgcgcaacggctggcggagctgcttaacgaaaagccaggcgataccgttggctaccggatgcgtgcgcaaaactgcgtcgggccaaatacccgtctggaagtagttaccgaaggcgtgctgacgcggatgatccagcgtgacccggagttgagcggtgttggattggtgatccttgatgaatttcatgagcgcagcttgcaggcggatttggcgttggcgctgttactcgatgtgcaacaaggtctgcgtgatgaccttaaactgctgattatgtcggctacgctggataacgaccgcttgcagcaaatgctgccagaagcgcccgtcgtcatctcagaagggcgctcgtttccggttgaacgccattatttaccgctgcccgcgcatcagcgttttgacgaagccgttgcggtagccaccgccgaaatgctgcgtcaggaaagcggatcattactgttatttttacctggcgtcggagaaattcagcgtgtgcaggaacaactggcttcgcgcatcggcagtgatgtgttgctctgcccgctgtatggcgcgttgtcgctgaacgatcagcgaaaagcgatcctcccggcaccgcaagggatgcgcaaagtggtgctggcgaccaatattgctgaaaccagtttaaccattgaaggtattcgtctggtggtggattgtgcccaggagcgtgtggcgcgttttgagccgcgcacggggcttacgcgactgattactcaacgcgttagccaggcatccatgacgcagcgtgccgggcgcgccgggcgtctggagccgggtatctgcctgcatttaatcgccaaagaacaagcagaacgcgctgccgcgcaaagtgaaccggagatcttacaaagcgatctttccggtttgctgatggaattactgcaatggggatgcagcgatccggcgcagatgagctggctggatcaaccgccagtagtgaatctaatggccgcgaaacgtctgttacaaatgctgggggcgctggacggtgaacggcttagtgcgcaagggcaaaaaatggcagcgctgggtaacgatccgcgtttagcggcaatgctggttagcgcgaagaacgacgacgaagctgctaccgcggcaaaaattgccgccattctcgaagagccgccactgatgggcaatagtgacctgggcgtggcgttttcgcgcaatcaaccagcctggcagcaacgtagtcagcaactgttaaaacgcttaaacgtacgcggcggtgaggcagacagttcgcttatcgcgccgctacttgccggggcgtttgccgatcgcattgctcatcgccgtgggcaagatggacgctatcaactggcaaacggcatgggagcgatgctcgatgccgacgacgcgctaagccgccacgaatggttgatcgcaccgttattattgcagggcagcgcctcgccggatgcgcggattttactggcgctaccggtcgatattgatgaattagtacaacgctgtccgcagctggtgcagcaatctgacaccgtggaatgggatgacgcgcaaggtacgctgaaagcctggcgtcggctacaaatcggtcagttgacggtgaaagtgcagccgctggcgaaaccgtcagaagacgagttgcatcaggcgatgcttaatggcatccgtgataaaggtttaagcgtgctcaactggacggcggaagcggaacagctacgcttgcgtttgttatgcgccgcaaagtggttgccggaatatgactggccagcggttgatgatgaaagtttattggcagcgctggaaacgtggctgctgccacatatgacaggcgtacattcactacgcggcctgaaatcactggacatttatcaggcactacgcggattacttgattggggaatgcagcaacgtctggatagtgaattgcctgcgcattacactgtgccgacgggaagccggatcgccattcgttatcatgaagataacccgcccgcactggcggtgagaatgcaggagatgtttggtgaggccactaatccgactatcgcccaggggggcgtgccgctggtgctggagttgctttcacccgcccaaaggccactacaaatcacacgagatttgagcgccttctggaaaggagcgtaccgtgaggtgcaaaaagagatgaaagggcgttatcccaaacacgtctggccggacgacccggcaaacacggcaccgacgcgacggacgaaaaagtattcgtaaggttggttttctccctctccctgtgggagagggccggggtgagggcatcagcgcgcacgttcaccctcaccctaaccctctccctcaagggagaggggaccgatcgagcacaaattttgagagatatcttcttctgtcttgtaacagaagaacagaaaatcgggcttttgcgcctgaatattgcggagaaaaagcatggccgggaatgaccgcgagccaattggacgcaaagggaaaccgacgcgtccggtcaaacaaaaggtaagccgtcgtcgttacgaagatgacgatgattacgacgattatgatgactatgaggatgaagaaccgatgccgcgcaaaggtaagggcaaaggcaaagggcgtaagcctcgtggcaaacgcggctggctatggctgctgttaaaactggctatcgtttttgccgtgctgatcgccatttacggcgtttatctcgatcaaaaaattcgtagccgtattgatggcaaggtctggcaactgcccgcggcagtttatggccgaatggtcaaccttgaaccagatatgaccatcagcaagaacgaaatggtgaagctgctggaggcaacacagtatcgtcaggtgtcgaaaatgacccgtcctggcgaatttaccgtgcaggccaacagcattgagatgatccgccgtccgtttgatttcccggacagcaaagaagggcaggtgcgtgcgcgtctgacctttgatggcgatcatctggcgacgatcgtcaatatggagaacaaccgtcagttcggtttcttccgtcttgatccgcgcctgatcaccatgatctcttcgccaaacggtgagcagcgtctgtttgtgccgcgcagtggtttcccggacttgctggtggatactttgctggcgacagaagaccgtcatttctacgagcatgatgggatcagtctctactccatcggacgtgcggtgctggcaaacctgaccgccggacgcacggtgcagggagcgagtacgctgacgcaacagctggtgaaaaacctgttcctctccagcgagcgttcttactggcgtaaagcgaacgaagcttacatggcgctgatcatggacgcgcgttacagcaaagaccgtattcttgagctgtatatgaacgaggtgtatctcggtcagagcggcgacaacgaaatccgcggcttcccgcttgcgagcttgtattactttggtcgcccggtagaagagctcagcctcgaccagcaggcgctgttagtcggtatggtgaaaggggcgtccatctacaacccgtggcgtaacccgaaactggcgctggagcgacgtaatctggtgctgcgtttgctacaacaacagcagattatcgatggtgaactgtatgaaatgctcagcgcgcgtcctctgggcgtacagccgcgcggtggggtaatctctccacagccagcctttatgcaactggtgcgtcaggagctgcaggcgaaattaggcgataaggtaaaagatctctccggcgtgaagatcttcactacctttgactcggtggcccaggacgcggcagaaaaagccgccgtggaaggcattccggcactgaagaaacagcgtaagttgagcgatcttgaaactgcaattgtggtcgtcgaccgctttagtggtgaagttcgtgcgatggtgggaggttctgagccgcagtttgcgggctacaaccgtgcgatgcaggcgcgtcgttcgattggttcccttgcaaaaccagcgacttatctgacggctttaagccagccgaaaatctatcgcctgaacacgtggattgccgatgcgccaatcgcgctgcgtcagccgaatggccaggtctggtcaccgcagaacgatgaccgtcgttatagcgaaagcggcagagtgatgctggtggatgcgttgacccgttcgatgaacgtgccgacggtaaatctggggatggcgctggggctgcctgcagttacggagacctggatcaaactgggcgtgccgaaagatcagctgcatccggttccggcgatgctgctgggggcgttgaacttaacgccaatcgaagtggcgcaggcattccagaccatcgccagcggcggtaaccgtgcaccgctttctgcactgcgttcggtaatcgcggaagatggcaaggtgctgtatcagagcttcccgcaggcagaacgcgctgttccggcgcaggcggcgtatctgacactatggaccatgcagcaggtggtacaacgtggtacgggtcgtcaacttggggcgaaatacccgaacctgcatctggcagggaaaacagggactaccaacaataacgtagatacctggtttgcgggcattgacggcagcacggtgaccatcacctgggtaggccgtgataacaaccagccgaccaaactgtatggtgccagcggggcaatgtctatttatcagcgttatctggctaaccagacgccaacgccgctgaatcttgttccgccagaagatattgcagatatgggcgtggactacgacggcaactttgtttgcagcggtggcatgcgtgtcttgccggtctggaccagcgatccgcaatcgctgtgccagcagagcgagatgcagcagcagccgtcaggcaatccgtttgatcagtcttctcagccgcagcaacagccgcaacagcaacctgctcagcaagagcagaaagacagcgacggtgtagccggttggatcaaggatatgtttggtagtaattaacatctaagcgtgaaataccggatggcgaattgccatccggtaaaataacatcccacctaaagtattaaccctttcttttcatctggttgtttattaacccttcaggaacgctcagattgcgtaccgcttgcgaacccgccagcgtttcgaatattatcttatctttataataatcattctcgtttacgttatcattcactttacatcagagatataccaatggcgcgttccaaaactgctcagccaaaacactcactgcgtaaaatcgcagttgtagtagccacagcggttagcggcatgtctgtttatgcacaggcagcggttgaaccgaaagaagacactatcaccgttaccgctgcacctgcgccgcaagaaagcgcatgggggcctgctgcaactattgcggcgaagcactctgctactgcgactaaaacggatacaccaattgaaaaaacgccgcagtctatttcggttgtgacaaatgaagagatgcagatgcgtcaatttcagtctgtaaaagaagcattaggttatacacctggcgttacggttagcagtcgtggtgcttctaatacatatgattttgttatcattcgtggtttctcatctgttggtctgaatcaaaataattaccttgatggactaaaacttcagggcaacttttataacgatgctgtgattgatccttacatgcttgagagggttgaactgatgcgtgggccgacgtctgttctctatggaaaaagtaatcctggtgggattatttctatggtgagtaagcgtccgaccactgaacccctgaaagaaattcagtttaaaatggggacggataatctgtttcagaccggattcgatttcagtgatgcactggatgataacggtgagttctcttaccgtttgacgggcctcgctcgctcaacaaacgaacagcagaaaaactctgaatctcagcgttataccattgctccatcattctcatggcgtccagacgacaaaaccaattttactttcctgtcctatttccagaatgaaccagaaacgggttattacggttggttgccgaaagaggggaccgttgagccattgcctaatggtaagcgtctaccgactgacttcaatgaaggtgcatcgaataatacatactcccgtaaccagaaaatggtgggatatagttttgaacatggttttaatgacaccttcaccgtgcgtcagaatctgcgtttcagtgaaatgaaaacctcacagaaaagtgtttatggcacagggattgctggtgatggtcataccctaaaccgcgggacagtggtggataatgagcgtctacaaaactttagcgttgatacccaacttgaaagtaagtttgctacaggtgacgtcgagcatactttgctgacaggggtagacttcatgcggatgcgtaatgatatcaatgccagctttggatccgcaccatccatcgatctttataacaaatatcaccctgaatactttgcatttggtagcgcagagccataccagatgaatgaaagcaaacaaacaggtatttatgttcaggatcaggcggaatggaataaatgggtattcactctggggggacgctacgattggtctaagcaagcgaccactgttcgtgaaaactcttatacgccgactgaaggttatattgagcgcaatgatcatcagttcacctggcgcggtggtgtaaattacttattcgataatggtatttcaccttactttagctatagccagtcctttgaaccgagtgctttcgatctgtggagcaacccgcgcatttcctataagccatcgaaaggtgaacagtatgaagctggcgtaaaatatgttccgaatgatatgccggtcgttgttacgggcgcagtctatcaattgacgaaaacaaataacctgacagcagacccaacaaacccattagcgcaagtcccagcaggtgagattcgcgctcgtggtgtggaacttgaagcaaaagcggcgttaaatgccaatattaacttgacggcttcttatacctacaccgatgcggaatacaccaaagacaccaatctcaaaggtaaaactccagaacaagtaccggagcatatggcatctctctggggggattataccttcaatgaagggccgctttctggtttaacattgggaacaggtggtcgttttattggttccagctatggtgatccggcaaacacttttaaagtgggtagcgcagctgtaatggatgctgttgtaaaatatgatctggcacgctttggtatggcgggatccagccttgctgtgaacgtcaacaatttgctcgatcgtgagtatgttgccagttgcttccagacttatggctgcttctggggcgcagaacgtcaggtcgttgcaaccgcaaccttccgtttctaatttctcttttggggcacggatttccgtgcccatttcacaagttggctgttatgcaggaatacacgaatcattccgataccacttttgcactgcgtaatatctcctttcgtgtgcccgggcgcacgcttttgcatccgctgtcgttaacctttcctgccgggaaagtgaccggtctgattggtcacaacggttctggtaaatccactctgctcaaaatgcttggtcgtcatcagcctccgtcagaaggggagattcttcttgatgcccagccgctggaaagctggagcagcaaagcgtttgcccgcaaagtggcttatttgccgcagcagcttcctccggcagaagggatgaccgtgcgtgaactggtggcgattggtcgttacccgtggcatggcgcgctggggcgctttggtgcggcagatcgcgaaaaggtcgaggaagctatctcgctggttggcttaaaaccgctggcgcatcggctggtcgatagtctctctggcggcgaacgtcagcgggcgtggatcgccatgctggtggcgcaggatagccgttgtctgttgctcgacgaaccgacttcggcgctggatatcgcccaccaggttgatgtgctggcgctggtgcaccgtttaagtcaggaacgtggcctgacggtcattgccgtgttgcacgatatcaatatggcggcacgctactgtgattatctggtcgccctgcgcagtggtgaaatgattgctcagggaacgcctgcggaaattatgcgcggcgaaaccctcgaaatgatttatggcatcccgatgggtattttgccgcatccggcgggtgctgcacctgtgagttttgtttattgatgagcggcttacctcttatttcgcgccgtcgactgttaacggcgatggcgctttctccgttgttatggcagatgaataccgcccacgcggcggctattgaccccaatcgtattgtggcgctggagtggttgccggtggaattactgctggcgctcggcatcgtgccttacggcgtggcggataccatcaactatcgcctgtgggtcagcgaaccaccattgccggactcagtgattgacgtcggtttgcgtacagaacctaaccttgaactgctgaccgaaatgaaaccgtcgtttatggtctggtcggcaggatatggcccttcatcagaaatgctggcacgtattgcgccgggtcgcggatttaacttcagtgacggcaaacagccgttggcgatggcgcgtaaatcgctgacggaaatggcagatttacttaacctgcaaagcgcagcggaaacgcatttagcgcaatacgaagactttatccgcagcatgaaaccccgctttgtgaagcgtggcgcacgcccgttactgctgacgacgcttatcgatccgcgccatatgctggtcttcggtccaaacagcttgttccaggaaattctcgatgagtacggcatcccaaatgcctggcaaggggaaaccaacttctggggcagtaccgccgtcagtatcgatcgtctggcagcgtataaagacgttgatgtgctctgttttgatcacgacaacagcaaagacatggatgcgctaatggcaaccccgctgtggcaggccatgccgtttgtccgcgccggacgctttcagcgcgtacctgcagtctggttttatggtgcgacactctcggcaatgcactttgtgcgcgttctggataacgccatcggaggtaaagcgtgagtaaacgaattgcgctttttccggcgttattgctggcgctgttagtgattgtcgctacggcgctcacctggatgaacttctcgcaggcgctgccgcgtagccagtgggcgcaggctgcctggtcgccagacatcgatgtcatcgagcagatgatttttcactacagcttgttgccgcgtctggcgatttcgctgctggtgggcgcgggcctggggctggtgggcgtgctgtttcagcaagtgctgcgtaacccgctggcggagccgacgacgcttggcgttgctacaggcgcgcaactgggaattaccgtcaccacactttgggcgatcccaggtgctatggcgagccagtttgccgcactggtgggcgcttgtgtcgttggcttaatcgtctttggcgtcgcgtgggggaaacggctttcgccggttacgcttattctcgcggggctggtggtgagcctttattgcggggcaattaatcagctactggttatcttccatcacgaccagctgcaaagcatgttcctgtggagcaccggaacgctgacgcaaaccgactggggcggcgttgagcgtttatggccgcagttgctgggcggcgtgatgttgacgttattgctacttcgcccgttaaccctgatggggcttgatgatggcgtggcgcgcaatctcgggctggccttgtcgctcgcgcgtctggcggcgctgtcgctggcgatagtcatcagtgcgctgctggtgaatgcggtggggattatcggctttatcggtttgttcgcgccgctgctggcgaaaatgctgggggcgcggcgtttgttgccacggttgatgctggcgtcgctgattggggcgctgatcctctggctttccgatcaaatcatcctctggctgactcgcgtgtggatggaagtgtccaccggttcggtcactgcgttgatcggtgcgccgctgctactgtggctgttgccgcgtttacgcagcattagcgcgccggatatgaaggtcaacgatcgtgtcgcggctgaacgccaacatgtgctggcgtttgccctcgcgggcggcgtgctgctgttgatggctgtggtggtggcgctgtcgtttggtcgtgatgcgcacggctggacgtgggcgagcggggcgttgctcgaggatttgatgccctggcgctggccgcgaattatggcggcgctgtttgcgggcgtcatgctggcggtggcgggctgtattattcagcggctgaccggaaacccgatggcaagcccggaagtgctggggattagctctggcgcggcgtttggcgtggtgttaatgctgtttctggtgccgggtaatgcctttggctggctgttacccgcgggcagtatcggggcggcggtgacgctgttgatcattatgatcgccgccggccgcggtggattttccccacaccgtatgttactggcggggatggcgttaagtaccgcattcaccatgcttttgatgatgttgcaggcgagcggtgacccgcgaatggcgcaagtgctgacctggatttccggttcgacctacaacgcgaccgatgcgcaggtctggcgtaccggaattgtgatggtgattttgctggcgattaccccgctgtaccgccgctggctgaccattttaccgctgggtggtgataccgcacgagccgtaggaatggcgctgacgccgacgcgaattgcgctgctgctgttagcggcttgcctgacggcgaccgcgacgatgactattggaccgttgagttttgttggtttaatggcaccgcatattgcgcggatgatgggctttcgacggacgatgccacacatcgtaatttcggcgctggtgggtggtttactgctggtattcgctgactggtgtgggcggatggtgctgtttccattccagatcccggcggggctgctgtcgacctttatcggcgcgccatattttatctatttgctgagaaagcagagccgttaatttttccatataacggccctgtacgcctggacggataaagcgtttacgcgacaacggatgcccgatgcgacgctggcgcgtcttatcgggcctacaaacggccccgaatcgtaggtcggataaggcgttcacgccgcatccgacaaaccatgctggatcacaacttcgcaaacacccgacgtgcagcatcgatggtgttattgatatcttccatgctgtgcgccacggacataaagcccgcttcaaacgctgacggtgccaggtaaacaccttcgtccagcatcatatggaagaaacgcttaaagcgttccacgtcacaggccatcacatcctgatagcacgtcacggactcggcgtcggtaaagaaaataccgaacatgccgccaacgtggttaacgaccagcggaattccggcttcttctgccgcttccagcagaccttctgccagacgtgttgtcagctcatccaacgtttcgtgaacgcccggttgcgcgacttcattcagacaggcgaaaccggctgccatcgcaattgggttaccggaaagcgtacccgcctgatagaccggacccgtcggggccagcgcatccattacatcacgacgaccaccgaatgcgcctaccggcattccaccgccgatgattttgcccaggcaggtgagatccggttccacaccgtaataatcctgtgcgccagccagtgccacgcggaagccggtcattacttcatcgatgatcagcaatgcgccaaattcgtcgcacagcgcacgcagacctggcaggaagtctggcagcggtggaacacagttcatattgcctgccaccggctcgatgataatacaggcaatctcttgcgggtattgctcaaacgcggcgcgtacagaagccagatcgttataagtacaggttaaggtatgtttggcgaaatctgccggaacgcccggcgagtttggctggcctaacgtgagtgcgccagaaccggctttcaccagcaggcagtcagcgtgaccgtggtaacacccttcaaatttaatgattttgtcgcgaccggtaaaaccacgggccagacggatggcgctcatcgtcgcctcggtgccggagttcaccatgcgcaccatatccatggtcgggaccaattcggtcaccagttgcgccattttcacttccatttcggttggtgcaccaaagcttaaaccacgctcggcggcttcaatcacggcattgcggattgccggatggttatggcccagcaccatcggcccccaggaaccgacataatcgatataggctttgccatcaacatcgtacagataagcgccgtccgctttttcgataaacagtggagtgccgcccacgccagtaaaggcgcgaacaggggagttcacaccgccagggatcagctcgcgcgctgcgctgtaaagattttcagacttactcatggagggttcctgattcgtagaaaaagtgaatggctgctattctatgttattcataacaagttaaatactcgtcaaacatcaggctgcttgtactggtgcaatcctgatttcttagagtataaaagttttgtgcatttgaaacattacgctttgcaaaggattttcatggaacgtgcgagtaaaatgccgtcatcttatttgtatgaccaataagtgatcattggatgaaaactgatactccctctttagaaacaccgcaggccgcgcgcctgcgacgcagacaactgattcgccaacttcttgagcgcgataaaaccccgttagccattttgtttatggcggcagtcgtcggcacgcttgttgggctggcagcggttgcttttgacaaaggtgtcgcctggttgcagaaccaacgtatgggggcgctggtacatactgctgataattatccgcttctgttaaccgtcgcttttctctgttcggcggtgctggcgatgtttggctactttttggtgcgcaaatacgcgccggaagcaggtggttcggggatcccggaaattgaaggggcgctggaagatcaacgtcccgttcgctggtggcgtgtattgccggtgaagttctttggcgggctggggacactcggcggaggcatggtgttggggcgcgaagggccaaccgtgcagatcggcggtaacattggccgtatggtgcttgatattttccgcctgaaaggtgacgaagctcgccatacgctgctggcaaccggtgctgctgcggggctggctgcggcctttaacgcgccgctggcgggtattttgtttattatcgaagagatgcgtccgcagtttcgctatacgttaatttcgataaaagcggtatttattggcgtcattatgtcgaccattatgtaccggatttttaatcatgaagttgcgttgattgacgtcggtaaactttctgatgcgccgcttaatacgctgtggctttatctgatcctcggtattatttttggcattttcggccctatttttaataaatgggtgctggggatgcaggatttgctgcaccgtgtgcacggcggcaatattaccaaatgggtactgatgggcggtgcgattggcggtctgtgtggattgctggggtttgtggcaccagcaacgtcgggcggcggttttaacctgattcctatcgctaccgcggggaatttcagcatgggaatgctggtgtttatcttcgtcgctcgggtcattaccaccttactctgcttctcttccggcgcgccgggcggtatttttgccccgatgctggcgctgggtactgtgctgggaaccgctttcggaatggttgccgttgagctgtttccgcaatatcaccttgaggcggggacgtttgctattgccggaatgggggcattactggcggcatctattcgcgcgccgttaacggggatcattctggttctggagatgaccgataactaccagctcattttgccaatgattattaccggtcttggcgcaacactattagcgcaatttaccggcgggaaaccgctatactcggcgattcttgcgcgcacgctggcaaaacaggaagctgagcaactggcgcgaagcaaggccgcatcagccagcgagaatacttgaacgaaataccagggtattagataatggcgattattattgggttagaatttgcccaattgccgatgtcgtttggagcaaaatatgagtgatgacgtagcactgccgctggagtttaccgacgcagcagccaacaaagttaaaagcctgatcgctgacgaagataacccgaatctgaaattacgcgtgtatatcacaggtggcggttgcagcggcttccagtatggtttcacctttgatgatcaggtgaacgaaggcgatatgaccatcgaaaaacagggcgttggcttggtggttgatccgatgagcctgcaatatctggtcggcggttccgttgactataccgaaggactggaaggttctcgtttcatcgtgaccaacccgaacgcgaaaagcacctgcggttgcggttcttcctttagcatctaatctgttgttcatgtgccggataaactatccggcgcatcttctctcttcaacgcccattctcatccagcgcaaacgtcggtagcttaagatgccaacgaatagccgccagccgaatcaatagcgtcacgaccatgcccatcatactggctgtttccagtggtacggaaaatgtgtaataagccgtagcgtggacaataccgccgataatacaggcagttgcgtagatttctgtacgtaaaatcatggggatctcgcgggccagtacatcacgaatgatcccgccgccaacgccagtaatgacgaccatacaaaccgcgattaacggaccgacttccgcattaaaggctttattcacgccaatgccgacaaacaccgccagaccaacggcgtccagcaccggcaacatccattttggtaagcgtcttggctggcgcaccagcacgatggtcagcatgctggttaccattgcaacgaccagatcggtgggatctttcacccaaaataccgggccgtgatccagcgccatgtcgcgaattgtcccgccgcctacagcggtaaccacgcccagtaccagaacaccaaaagggtccatacgcaattttccggctaacaaaacgccggagatggcaaataccgctgtgccgactatatccagccaatagacgagcattgttcaatccccactgagcacctaaaaaggtcaggcgctaatctacctgtgaaagcgcattacagagctgttgtgcagcgaggataatacgtgggcttgcacgttcaaaccagtcactcgtgagaggaataacgggaattttgagctgttcaccccagtattgtttgattttaggaatttggtccggtccgcctgtaatgacaatcgcctgtggcgagcgtgctaacacctgttcgcggctaacttgcggccagggaacccggctgtctttaaagatgttttctccgccacaaacttcgagtacctggttttgaatcgactcttttccactggtaaatggcggattaatgccgaattgcagaaaaacacgttttttaggtttatcagcatattgcgctttcaattgcgcgtactgatccagcagggattgcgcggcttgttcggccttatccggttgcggactccagggggccaattgacgtaacgcattggcaatttgttcaatgcttgtcgcatcgacccacatcacttttattcccagcgaagccagctggtcaacctgccgctcggcattacctccacgccaggcaatcaccagatcgggtttcagcgcgacaatgcgttccagattcatcccctgccaggtggaaacctgctcaatcttttgcgcttgtggaggatagtcggaatagctgctgaccccaaccggcgtgatcccggcggcaaaggcaagttcagtgttggcgggagaaagcgtgatgacgcgcggcgcggcgttgagccacagtggcgcaagaaaagacagggcgaccagcgccctgaacagtgacttagccatgtgccagtttctgcaccagtgactcaaccatcaggctggactgtttagcggcaacagccaggaactcatcgaagctaagatgagactgttgatcggccacgtcggagatggcgcgtacgacaacaaacgggacgttgaaattgtggcagacatgggcgattgccgtcgcttccatctctacagcaatggcctgtgggaagttgtggcggattttcgccagaccaacagaaccgttgatgaaagcgtcgccgctaacaatcaggccacgtacagcgttaagattcagttcggcaatgcaggcctcagcggcagcgatcagtttatcgtcagctttaaagcctgccggacagcctggtaactgaccgtattcataaccaaatgccgtgacatccgcgtcgtgataacgcgcttcgtccgagacaacgatatcgcccactttcagcgttggtgccaggccaccggcagaaccggtgttaataatcacatctggcttgcagtgttccaacagcagagtggcacccagcgccgcagcgactttaccgatgcccgatttcagaagcgcaacctcggttccattcagttggccggtatagatttcgcaaccgccgagactgatagtttgacggttttcgattttgtcacgcagcagcgtaacttcttcttccattgcaccaatgatgccgattttcatagatttactcgcgataagcccgatttgaaagcatagtttaccatgcgcttacggggaagcgtatttctcacgcgggagaggacatggcacagattgatttccgaaaaaaaataaactggcatcgtcgttaccgttcaccgcagggcgttaaaaccgaacatgagatcctgcggatcttcgagagcgatcgcgggcgtatcatcaactctccggcaattcgtcgtctgcaacaaaagacccaggtttttccactggagcgcaatgccgccgtgcgcacgcgtcttacccactcgatggaagtccagcaggtgggacgctacatcgccaaagaaattttaagccgtctgaaagagcttaaattgctggaagcatacggcctggatgaactgaccggcccctttgaaagcattgttgagatgtcatgcctgatgcacgatatcggcaatccgccgtttggtcattttggcgaagcagcgataaatgactggtttcgccaacgtttgcacccggaagatgccgaaagccagcctctgactgacgatcgctgcagcgtggcggcactacgtttacgggacggggaagaacagcttaacgagctgcggcgcaagattcgtcaggacttatgtcattttgaggggaatgcacaaggcattcgtctggtgcatacattgatgcggatgaatctcacttgggcacaggttggcggtattttaaaatatacccgtccggcgtggtggcgtggcgaaacgcctgagacacatcactatttaatgaaaaagccgggttattatctttctgaagaagcctatattgcccggttgcgtaaagaacttaatttggcgctttacagtcgttttccattaacgtggattatggaagctgccgacgacatctcctattgtgtggcagaccttgaaggtgatgctgccaacttactgatttagtgtatgatggtgtttttgaggtgctccagtggcttctgtttctatcagctgtccctcctgttcagctactgacggggtggtgcgtaacggcaaaagcactgccggacatcagcgctatctctgctctcactgccgtaaaacatggcaactgcagttcacttacaccgcttctcaacccggtacgcaccagaaaatcattgatatggccatgaatggcgttggatgccgggcaactgcacgcattatgggcgttggcctcaacacgattttacgtcacttaaaaaactcaggccgcagtcggtaacctcgcgcatacagccgggcagtgacgtcatcgtctgcgcggaaatggacgaacagtggggctatgtcggggctaaatcgcgccagcgctggctgttttacgcgtatgacagtctccggaagacggttgttgcgcacgtattcggtgaacgcactatggcgacgctggggcgtcttatgagcctgctgtcaccctttgacgtggtgatatggatgacggatggctggccgctgtatgaatcccgcctgaagggaaagctgcacgtaatcagcaagcgatatacgcagcgaattgagcggcataacctgaatctgaggcagcacctggcacggctgggacggaagtcgctgtcgttctcaaaatcggtggagctgcatgacaaagtcatcgggcattatctgaacataaaacactatcaataagttggagtcattaccgaccttgaagatgcggtagagaaaagaatatttaccgttgagcagctttatcatcatttgcacgaggcgtggggtcagcatgagaaaggttcgctcttttcgctagtggttgaaaatgcctgggaaaaatcacgctcaaatagtttaagccgcagtacggaagatcagttttttatgtatttacgggtaaacaccctaaataaactggtaccctacgcggcacaacgatttattgataatctgcctgcgattttcgccggaacgtttaatcatgcattattggaagatgccagcgaatgcagcgatcttcttaagctatataaaaatgtcgctgtaaaacatgtgtttagccatccggatgtcgagcagcttgaattgcagggctatcgggtcattagcggattattagagatttatcgtcctttattaagcctgtcgttatcagactttactgaactggtagaaaaagaacgggtgaaacgtttccctattgagtcgcgcttattccacaaactctcgacgcgccatcggctggcctatgtcgaggctgtcagtaaattaccgtcagattctcctgagtttccgctatgggaatattattaccgttgccgcctactgcaggattatatcagcggtatgaccgacctctatgcgtgggatgaataccgacgtctgatggccgtagaacaataaccaggcttttgtaaagacgaacaataaatttttaccttttgcagaaactttagttcggaacttcgcgctataaaacgaatctgaagaacacagcaattttgcgttatctgttaatcgagactgaaatacatgaaaaaaaccacattagcactgagtgcactggctctgagtttaggtttggcgttatctccgctctctgcaacggcggctgagacttcttcagcaacgacagcccagcagatgccaagccttgcaccgatgctcgaaaaggtgatgccttcagtggtcagcattaacgtagaaggtagcacaaccgttaatacgccgcgtatgccgcgtaatttccagcagttcttcggtgatgattctccgttctgccaggaaggttcaccgtttcagagctctccgttctgccaggggggccagggcggtaatggcggcggccagcaacagaaattcatggcgctgggttccggcgtcatcattgatgccgataaaggctatgtcgtcaccaacaaccatgttgttgataacgcgacggtgattaaagtccagctgagcgatggtcgtaagttcgacgcgaagatggttggcaaagatccgcgctctgatatcgcgctgatccaaatccagaacccgaaaaacctgaccgcaattaagatggcggattctgatgcactgcgcgtgggtgattacaccgtagcgattggtaacccgtttggtctgggcgagacggtaacttccgggattgtctctgcgctggggcgtagcggcctgaatgctgaaaactacgaaaacttcatccagaccgatgcagcgatcaaccgtggtaactccggtggtgcgctggttaacctgaacggcgaactgatcggtatcaacaccgcgatcctcgcaccggacggcggcaacatcggtatcggttttgctatcccgagtaacatggtgaaaaacctgacctcgcagatggtggaatacggccaggtgaaacgcggtgagctggggattatggggactgagctgaactccgaactggccaaagcgatgaaagttgacgcccagcgcggtgctttcgtaagccaggttctgcctaattcctccgctgcaaaagcgggcattaaagcgggtgatgtgatcacctcactgaacggtaagccgatcagcagctttgccgcactgcgtgctcaggtgggtactatgccggtgggcagcaaactgaccctgggcttactgcgcgacggtaagcaggttaacgtgaacctggaactgcagcagagcagccagaatcaggttgattccagctccatcttcaacggcattgaaggcgctgagatgagcaacaaaggcaaagatcagggcgtggtagtgaacaacgtgaaaacgggcactccggctgcgcagatcggcctgaagaaaggtgatgtgattattggcgcgaaccagcaggcagtgaaaaacatcgctgaactgcgtaaagtgctcgacagcaaaccgtctgtgctggcactgaacattcagcgcggcgacagcaccatctacctgttaatgcagtaatctccctcaaccccttcctgaatacgggaaggggttctccttacaatctgtgaacttcgccacaactccatacatcttcatcatcctttgggcatttgcacaatgccgtacgttacgtacttccttatgctaagccgtgcataacggaggacttatggctggctggcatcttgataccaaaatggcgcaggatatcgtggcacgtaccatgcgcatcatcgataccaatatcaacgtaatggatgcccgcgggcgaattatcggcagcggcgatcgtgagcgtattggtgaattgcacgaaggtgcattgctggtactttcacagggacgagtcgtcgatatcgatgacgcggtagcacgtcatctgcacggtgtgcggcaggggattaatctaccgttacggctggaaggtgaaattgtcggcgtaattggcctgacaggtgaaccagagaatctgcgtaaatatggcgaactggtctgcatgacggctgaaatgatgctggaacagtcgcggttgatgcacctgttggcgcaggatagccgtttgcgggaagaactggtgatgaacctgattcaggctgaggagaatactcccgcacttactgaatgggcgcaacggctggggattgatctcaatcaaccgcgagtggtggctattgttgaggtcgacagcggtcagcttggcgtggacagcgcaatggcggagttacaacaactgcaaaatgcgctgactacgcccgagcgtaataatctggtggcaattgtttcgctgaccgaaatggtggtgttgaaaccggcgttgaactcttttgggcgctgggatgcagaagatcatcgtaagcgagttgaacaactgattacccgcatgaaagagtacggccagctgcgttttcgcgtttcactgggcaactattttaccggtcctggcagtattgcccgatcctatcgtacggcgaaaacgacgatggtggtgggtaaacagcggatgccagaaagtcgctgctatttttatcaggatctgatgttacctgtgttactcgacagtttgcgtggcgactggcaggccaacgaactggcgcgaccgctggcgcggctgaaagcgatggacaataatggcttgctgcgacgaacgctggcggcgtggtttcgccacaatgtgcaaccgctggctacgtcaaaggcgctgtttattcatcgtaatactctggagtatcggcttaatcgtatatcggaactgaccgggcttgatttgggtaattttgatgacaggttgctgctgtatgtggcgttacaactggatgaagagcggtaggttatgcgttaaggtcgaggcggcgctggctcattcccctcagcccgaagggtagaggggaatgtccgagttaaccgtcagttcggcattatttacgcgttagtttttccagatcggcttcaatctcgctgatcttattggttacgactgactccaggtgacgtaagtcgtcgaggatcttacgcttaagatcaacttcgctgcggtcacgctggcagatttgatcaagctcatcaatgatataccgtagattcgggctgatttcctggacttctttataaccctgacccacaccatcagcgacgaccgttttacgctgacgcggatatttaaacttcacgctcttggcgaaaaactcgcctttgtctttctggaaatagattttcagaatatcgttgttggcttcctgccggaggctgtaacgatcaatttcttcaggattggtaatacccagacttttcagattgtcgtacatagcgttacctcaaaatgagtcagtaaattgtgcttattttagcatttggcatggcccgcccggctcgactgtgatcgcagaaagcctttttcttccagacttctatcatggcgtaaaaatcaaaaaattacctgctttattgtggtgataaaattcacgttctacaccagttccagcatcgttacttccgggcggcagttcagacgcaaaccatacaaactgcccacgccacgggttgtgtagatgtgtcgttcgccaaaggcatttaatccggcgacgtaacgtttatcttcgacaggggcaaaaggttcaccaaccaacggtacgcgcagttgcccgccgtgagtatggccgcacagcatcagatcccagggttcatcacgcatgacttctttgctgtcgggattatgtgccagcatcagtcttggcagatttgcttcgctggcgggaggtggtttgcattgtccggcccataagtcaccggtgcctaccagttcgaattgcctgttcggcgtggcgatcaccgtagcctggttaaacaacaccgtgatgcccactgatttcaacgtctcgccaattaagtgatttttttctgtaccaacagggcgatcgtggttgccgaagcaggcaaacgtcggcgcacattcggcaaggggggagaggacatcactaaacgccgaaaaattcagcggcatatcaaataatacgtaatcgccgcccagtaatatcaaatcgggcttttgttctatgccaagagcaatcgcgtcagaaatcaggcttaaaggaacaaaacgagagtaatggagatcggccagaaaaagaattttgaatggtgctgcgttgtctttaaaaaaggcgaggcggtgacggattaattcaaaccagcctagctcccagtaatgcatataaccgaaacctgagctcgtggctatcgtcgcggcagtagcctgcaacaatcggcggcgtgaaatcatcgctcatccctgcaaaaaaaatcgggcagcgtcgtgctgcccgtgtgcatacttttagtcgatggtacgcagcagttcgttaatgccgactttgccgcgagttttcgcgtcaactttcttaacgataaccgcacagtagaggctgtatttgccatcttttgacggcagattacctgaaacaaccacagaccccgccggaacgcgaccgtagtggatttcgccggtttcacggtcgtaaatacgggtgctctgaccaatgtatacgcccatggaaatgacggaaccttcttcgacaatcaccccttcaaccacttcagagcgtgcgccaatgaagcagttatcttcaatgatggttgggttagcctgcagcggttccagcacgccgccgatgcccacgccaccggaaaggtggacgtttttaccaatctgcgcacaagaaccgacggtcgcccaggtatcaaccatggtgccttcatcaacatatgcgccgatgttgacgtaagacggcatcagcacggtgttacgggcaataaacgcaccctgacgtaccgccgctggtggcacaacgcggaagccttctttctggaaacgtgcttcgtcgtagtcggcgaatttcatcggcactttgtcgaagtagcggctttctgccccttcgatcacctgattatcattaatacggaaagagagcagcaccgcttttttcaaccactgatgcgtcacccactgaccgtcaattttttccgctacacgcagtgcaccggaatccagcagggcgatcacctgatttaccgcttcgcgggtaacggtgtctgcgttggctggcgtgatctcggcacggcgttcaaaagcggtttcaataatgttctgtaactgctgcattgttaaactcttttcatatcagtaaacacatcaccctttatcgtttggattgagggcctctgtcaaccgctgatgcacttcctgctgcaactcgttattaagtgcacgccggtcagcggtggcaattatgaataaatcttctactcgctcgccaatggttgtaattcgggcaccatgaagcgaaattcccagatcggcaaaaattttcccgactctcgccagcagtcctggctggtcgagcgcgataagctcaaggaacgatttgcggtcggtatgggttggcaaaaacgtcacttcggtttcaacagtaaagtgacgtagtttagccggttgacgacgcggctgtggtggctgccagctactttgtgtcagtacctgctccagaccaaaccgaataacctcatgacgatctgcggatagcgggctaccatcgggttccagcacgatgaaggtatccatcgccataccgtcgcgagtggtgaaaatttgtgcgtcgtgaacacttaaattgcggcggtctaattcggcacagacggcggcaaacagataggggcggtccgggctccagataaaaatctcggtgcctccacgcgtagcctgcgggctaagcaataccagcggtttgcttaaatcatgctgtaataaatggcgggcatgccaggccagttgatttgggctatggcggacaaaatagttagcacgacagcgtgaccaaatttggtgcagcgcctcttcgtcgatgttatccatgcgcagtagtgccagtgcctggagttggtgatggcgaacccgttcgcgcatatccggcgtgttttgcattccgcgtcgtagctgcttttcggtggcaaaatagagttcgcgcaacagactttgcttccagctattccacagcgtttcgttggtggcgcaaatgtcagccactgtcaggcataccagatagtgcagacgattttccgtttgaacttcttcggcaaactgcttgatgacttcagggtcctgaatatcgcggcgttgtgctgtcaccgacatcagcaagtgctggcgaaccagccaggcaaccagctgtgtttcgcgtgagttcagcccgtggagttctgcaaaatgcactacatcctgagcaccgagaatggagtggtcgccgccgcgtcctttggcgatatcgtgaaacagcgcggcgatgaaaatcagctcagttgacggcaggcgcggccagacgtccacacacaacggatggcgctggcgcgtttcttcactggcaaaactctccagtttcagcatcacgcggatagtatgttcatccaccgtgtaggcgtggaacagatcaaactgcatctgcccgacgatatgcgaccattgcggcatatacgcgccgagcacgctatggcgatgcattggcaatagcccgcgccgcaccgctccggggtgacgcagaatgctcaaaaacagttttcgtgcttccggaatattacacagcggttgttgcagatggcgacgggcatggcgtaactggcgcagcgtggtggagtaaatgccggtgatcgcactgttgcgcaccatggtgtagaacatacgcaagatggcttccggctggcgcataaatagtgtttcatcacgcaggtcgattagcgtaccgcgtagctgaaactcatcgtcgattggacgtggtttttcgtcggcgggaagggcgaggatggcttcatcgaacagttgcagcagcatctggttgagttcactgacgcggcgtgtaacgcggaagtaatccttcatcatccgctcgaccggttcgttgccttcaccactgtaattcagacgctgagcgacgctaagttggcgatcgaataacaggcgattatcgtaacggctgacgaccagatgcagggcaaagcgaatacgccacagtatatgcagacattcgtttaattccgcccgctccgctgaggttaagaagccaaacccaaccatttcatccagcgatgttgcgccaaaatgacggcgggccacccattgcagagtgtggatatcgcgcaagccgccagggctacttttgatgtctggttcaagattgtagctggtgccgtggtaacgctgatggcgctggttctgttcttcaactttcgccgcgtagaacttgtcggaaggccagaatccttcgctaaaaatatgtttttgcagttcgaggaagagcgcaacatcgccaattaataagcgggattcgattaaattggtggcgacggttaaatccgataacccttccagcatgcactcttcaagcgtgcgcacactatgaccgacttccagctttacatcccagagcagcgttaacagctcgcccactttttgcgcctgatcgtccgggagctttttacggcttaaaatcagtaaatcgatgtcagaaagtggatgcagctcgccacgaccgtagccaccgacggcgaccaatgccaggtcggcaatctggctgaatcccgcttcaatccataatcgttgcaggagctggtcgataaactcggtgcgcgcctcaatcaactgttctgcagagatcccattgtcaaaggcatcacccagccaacgctggaaagtatcgatatgggcttttatcccaccgacggttaattcatcacggggccagacgcatggattttgcggttgaccgggcagggtggggagagcggtgtttgcgtactgttctggaagggtattcattgtgcgccacccataagattaaattatcgcattaaaaaagccggcattcgccggcttcatcttattcgtcgtgcgagattatcgccgggatggtgtcatccttgcgtagcgtcagaatttcgcagccgttatcagtcaccacaatagtatgctcatattgtgcagacaagctgcgatctttggtttttaccgtccagccatctttcatggtgcggatctcttttttacccgcgttgaccattggctcgatggtgaacgtcatcccaggtttcagtacgacgttggtttcacgggagtcatagtgcagcacctgcggttcttcatggaagccgcgaccaataccgtgtccgcaatattcacgaacgacggagaagccttctgcttcgacaaacttctgaatcgccgcaccgatttcgcgcaggttaatgcctggtttgaccatgcgcagcgccaggtacaggctttcttgcgtgatgcggcacagacgttcgcccatgatggtcggcttaccgacgataaacattttcgaggtatcgccgtggaaaccatctttgattacggtgacatcaatgttaacgatatcgccatctttcagcagcttcgcatcgtccgggataccgtggcacaccacttcattaatagagatgcaaacggatttcggatagccgtgatagccgaggcaggcagaaaccgcgtgttgttcattaacaatgtaatcattacagatgcgatccagctcgccggtgctgacgcccggtttaacatacggttcgatcatctccagcacttcggcagccagtcggccagcgacgcgcattttttcgatatcttctggggtcttgattgagatagccattaattctgtccatcagcgtcggtgataccgacaatatatatgtaagtgccgtcaatggtatcacacccgggcaaattgagaatcattctgaatttcgccaaacgtgccactgaacgttttctataatagaaaattcaacgtctgatgctgtacacagcgccaacaattattggtgtccatgacgtatttgtggtataaagcgcgccggacttccgatccatttcgtatacacagactggacggaagcgacaatctcactttgtgtaacaacacacacgtatcggcacatattccggggtgccctttggggtcggtaatatgggatacgtggaggcataaccccaacttttatatagaggttttaatcatggcaactgtttccatgcgcgacatgctcaaggctggtgttcacttcggtcaccagacccgttactggaacccgaaaatgaagccgttcatcttcggtgcgcgtaacaaagttcacatcatcaaccttgagaaaactgtaccgatgttcaacgaagctctggctgaactgaacaagattgcttctcgcaaaggtaaaatccttttcgttggtactaaacgcgctgcaagcgaagcggtgaaagacgctgctctgagctgcgaccagttcttcgtgaaccatcgctggctgggcggtatgctgactaactggaaaaccgttcgtcagtccatcaaacgtctgaaagacctggaaactcagtctcaggacggtactttcgaaaagctgaccaagaaagaagcgctgatgcgcactcgtgagctggagaaactggaaaacagcctgggcggtatcaaagacatgggcggtctgccggacgctctgtttgtaatcgatgctgaccacgaacacattgctatcaaagaagcaaacaacctgggtattccggtatttgctatcgttgataccaactctgatccggacggtgttgacttcgttatcccgggtaacgacgacgcaatccgtgctgtgaccctgtacctgggcgctgttgctgcaaccgtacgtgaaggccgttctcaggatctggcttcccaggcggaagaaagcttcgtagaagctgagtaataaggcttgataactcccccaaaatagttcgagttgcagaaaggcggcaagctcgagaattcccgggagcttacatcagtaagtgaccgggatgagcgagcgaagacaacgcatctgcggcgcgaaatatgaagggggagagcccttatagaccaggtagtacacgtttggttagggggcctgcatatggccccctttttcacttttatatctgtgcggtttaatgccgggcagatcacatctccgaggattttagaatggctgaaattaccgcatccctggtaaaagagctgcgtgagcgtactggcgcaggcatgatggattgcaaaaaagcactgactgaagctaacggcgacatcgagctggcaatcgaaaacatgcgtaagtccggtgctattaaagcagcgaaaaaagcaggcaacgttgctgctgacggcgtgatcaaaaccaaaatcgacggcaactacggcatcattctggaagttaactgccagactgacttcgttgcaaaagacgctggtttccaggcgttcgcagacaaagttctggacgcagctgttgctggcaaaatcactgacgttgaagttctgaaagcacagttcgaagaagaacgtgttgcgctggtagcgaaaattggtgagaacatcaacattcgccgcgttgctgcgctggaaggcgacgttctgggttcttatcagcacggtgcgcgtatcggcgttctggttgctgctaaaggcgctgacgaagagctggttaaacacatcgctatgcacgttgctgcaagcaagccagaattcatcaaaccagaagacgtatccgctgaagtggtagaaaaagaataccaggtacagctggatatcgcgatgcagtctggtaagccgaaagaaatcgcagagaaaatggttgaaggccgcatgaagaaattcaccggcgaagtttctctgaccggtcagccgttcgttatggaaccaagcaaaactgttggtcagctgctgaaagagcataacgctgaagtgactggcttcatccgcttcgaagtgggggaaggcatcgagaaagttgagactgactttgcagcagaagttgctgcgatgtccaagcagtcttaattatcgaaaaggagccgcctgagggcggcttctttttgtgcccatcttgtaaattcagctaacccttgtggggctgcgctgaaaagcgacgtacaatgtcgctagtattaattcatttcaatcgttgacagtctcaggaaagaaacatggctaccaatgcaaaacccgtctataaacgcattctgcttaagttgagtggcgaagctctgcagggcactgaaggcttcggtattgatgcaagcatactggatcgtatggctcaggaaatcaaagaactggttgaactgggtattcaggttggtgtggtgattggtgggggtaacctgttccgtggcgctggtctggcgaaagcgggtatgaaccgcgttgtgggcgaccacatggggatgctggcgaccgtaatgaacggcctggcaatgcgtgatgcactgcaccgcgcctatgtgaacgctcgtctgatgtccgctattccattgaatggcgtgtgcgacagctacagctgggcagaagctatcagcctgttgcgcaacaaccgtgtggtgatcctctccgccggtacaggtaacccgttctttaccaccgactcagcagcttgcctgcgtggtatcgaaattgaagccgatgtggtgctgaaagcaaccaaagttgacggcgtgtttaccgctgatccggcgaaagatccaaccgcaaccatgtacgagcaactgacttacagcgaagtgctggaaaaagagctgaaagtcatggacctggcggccttcacgctggctcgtgaccataaattaccgattcgtgttttcaatatgaacaaaccgggtgcgctgcgccgtgtggtaatgggtgaaaaagaagggactttaatcacggaataattcccgtgatggataaataagggtaagattccgcgtaagtatcgcgggggcgtaagtctggttataaggcgttattgttgcaggcagtttggtcacggccagcgcgcagcaaccggagcgtacaaaagtacgtgaggatggcgagcactgctcggggccaaaatggcaaataaaatagcctaataatccagacgattacccgtaatatgtttaatcagggctatacttagcacacttccactgtgtgtgactgtctggtctgactgagacaagttttcaaggattcgtaacgtgattagcgatatcagaaaagatgctgaagtacgcatggacaaatgcgtagaagcgttcaaaacccaaatcagcaaaatacgcacgggtcgtgcttctcccagcctgctggatggcattgtcgtggaatattacggcacgccgacgccgctgcgtcagctggcaagcgtaacggtagaagattcccgtactctgaaaatcaacgtgtttgatcgttcaatgtctccggccgttgaaaaagcgattatggcgtccgatcttggcctgaacccgaactctgcgggtagcgacatccgtgttccgctgccgccgctgacggaagaacgtcgtaaagatctgaccaaaatcgttcgtggtgaagcagaacaagcgcgtgttgcagtacgtaacgtgcgtcgtgacgcgaacgacaaagtgaaagcactgttgaaagataaagagatcagcgaagacgacgatcgccgttctcaggacgatgtacagaaactgactgatgctgcaatcaagaaaattgaagcggcgctggcagacaaagaagcagaactgatgcagttctgatttcttgaacgacaaaaacgccgctcagtagatccttgcggatcggctggcggcgttttgctttttattctgtctcaactctggatgtttcatgaagcaactcaccattctgggctcgaccggctcgattggttgcagcacgctggacgtggtgcgccataatcccgaacacttccgcgtagttgcgctggtggcaggcaaaaatgtcactcgcatggtagaacagtgcctggaattctctccccgctatgccgtaatggacgatgaagcgagtgcgaaacttcttaaaacgatgctacagcaacagggtagccgcaccgaagtcttaagtgggcaacaagccgcttgcgatatggcagcgcttgaggatgttgatcaggtgatggcagccattgttggcgctgctgggctgttacctacgcttgctgcgatccgcgcgggtaaaaccattttgctggccaataaagaatcactggttacctgcggacgtctgtttatggacgccgtaaagcagagcaaagcgcaattgttaccggtcgatagcgaacataacgccatttttcagagtttaccgcaacctatccagcataatctgggatacgctgaccttgagcaaaatggcgtggtgtccattttacttaccgggtctggtggccctttccgtgagacgccattgcgcgatttggcaacaatgacgcccgatcaagcctgccgtcatccgaactggtcgatgggacgtaaaatttctgtcgattcggctaccatgatgaacaaaggtctggaatacattgaagcgcgttggctgtttaacgccagcgccagccagatggaagtgctgattcacccgcagtcagtgattcactcaatggtgcgctatcaggacggcagtgttctggcgcagctgggggaaccggatatgcgtacgccaattgcccacaccatggcatggccgaatcgcgtgaactctggcgtgaagccgctcgatttttgcaaactaagtgcgttgacatttgccgcaccggattatgatcgttatccatgcctgaaactggcgatggaggcgttcgaacaaggtcaggcagcgacgacagcattgaatgccgcaaacgaaatcaccgttgctgcttttcttgcgcaacaaatccgctttacggatatcgctgcgttgaatttatctgtactggaaaaaatggatatgcgcgaaccacaatgtgtggacgatgtgttatctgttgatgcgaacgcgcgtgaagtcgccagaaaagaggtgatgcgtctcgcaagctgaggataatccggctacagagagtcgcgctatttgttagcgtagggcttcagtgatatagtctgcgccatctgatcgtaagtagttggctttataaggtcaggtatgccgtggttttacacggcttttttttgtataggcttcagtattcctgagtaccgtaaaccctgtcagggaataaaaaacgcgtgatgttgtctgctactcaaccacttagcgaaaaattgccagcgcatggctgccgtcatgttgcgatcattatggacggcaatggtcgctgggcaaaaaagcaagggaggattcgtgcctttgggcataaagccggggcaaaatccgtccgccgggctgtctcttttgcggccaacaacggtattgaggcgttaacgctgtatgcctttagtagtgaaaactggaaccgaccagcgcaggaagtcagtgcgttaatggaactgtttgtgtgggcgctcgatagcgaagtaaaaagtctgcaccgacataacgtgcgtctgcgtattattggcgataccagtcgctttaactcgcgtttgcaagaacgtattcgtaaatctgaagcgctaacagctgggaataccggtctgacgctgaatattgcggcgaactacggtggacgttgggatatagtccagggagtcaggcaactggctgaaaaggtgcagcaaggaaacctgcaaccagatcagatagatgaagagatgctaaaccagcatgtctgtatgcatgaactggcccctgtagatttagtaattaggactgggggggagcatcgcattagtaactttttgctttggcaaattgcctatgccgaactttactttacagatgttctctggcccgatttcgatgaacaagactttgaaggggcgttaaatgcctttgctaatcgagagcgtcgtttcggcggcaccgagcccggtgatgaaacagcctgatggggggcgcttttgctgaagtatcgcctgatatctgcttttgtgttaatacccgtcgtcatcgcggcgttgtttctgttgccgccggtggggttcgccatcgtaacgctggtggtctgcatgctggcagcgtgggaatggggacagcttagcggttttaccactcgttcgcagcgagtatggttggcggtgttatgcgggttattgttggcgctgatgctttttctgttgccggaatatcaccgaaatattcatcaaccgctggttgaaatctcactttgggcttcgttgggttggtggattgtcgcgctattgctggtgctgttttacccaggttccgcagcaatctggcgtaactctaaaacattgcgccttatttttggcgtgctaaccattgttcccttcttctggggcatgctggcgttacgggcctggcactatgacgagaatcattacagtggcgcaatatggctgctctatgtcatgatcctggtatggggcgctgactccggcgcatatatgtttggcaaattgtttggtaaacataagctggcaccgaaggtttctccgggtaaaacctggcaaggctttataggtggactagcgaccgcagcggtaatctcatggggttatggcatgtgggcgaatctcgacgtcgctcccgtcaccttactcatttgctctattgtcgcagcgttagcctcagtgctcggcgatctgaccgagagtatgtttaagcgtgaagcaggaattaaggacagcggtcatttaattccaggacacggtggtattttagatcgtattgatagcctgacggctgcggtaccggtctttgcttgcttgttgttactggtattcaggacgctttaacggaaggtaatatgctgagttttctctgggatttggcttcgttcatcgttgcactgggtgtacttatcaccgtgcatgaatttggtcatttctgggttgcccggcgttgtggtgttcgcgttgagcgtttctcaatagggtttggtaaggcgctctggcggcgaactgataagctcggcaccgaatatgttatggccctgattccgctgggcggttatgtcaaaatgctggatgagcgcgcagaaccggtcgttccggaactccgccaccatgccttcaataataaatctgttggccaacgagcggcgattattgccgcaggtccggttgcaaacttcatttttgctatctttgcctactggctggtttttattattggtgtgcctggcgtacgtccggtggttggtgaaatagcagccaattcgatagctgcggaagcacaaattgcaccaggtacggaactaaaagccgtagatggtatcgaaacgcctgattgggatgccgtgcgtttgcagttggtcgataaaattggcgatgaaagcaccaccattacagtagcgccatttggcagcgaccaacggcgggatgtaaagctcgatttacgtcactgggcgtttgagcctgataaagaagatccggtatcttcgctggggattcgtcctcgtgggccgcaaattgaacctgtactggaaaatgtgcagccaaactcggcggcaagcaaggcaggtttgcaagcaggcgacaggatcgttaaagtcgatggtcagcccttaacgcagtgggtgacctttgtgatgcttgtccgggataacccgggtaaatccttagcgttagaaatcgaaaggcaggggagtcccttgtctttgacattaatcccggagagtaaaccgggtaatggtaaagcgattggttttgtcggtattgagccgaaagtcattcctttgccagatgagtataaagttgtacgccagtatgggccgttcaacgccatcgtcgaagccacggacaaaacgtggcagctgatgaagctgacggtcagtatgctgggaaaattgatcaccggtgatgtgaaactgaacaacctcagtgggccgatctctatcgccaagggggctgggatgacagcggaactcggggtagtttattacctgccgtttcttgcgcttattagcgtgaacttagggataattaacctgtttccgttgcccgtacttgacggggggcatctgctgttccttgcgatcgaaaagatcaagggcggaccggtatccgagcgggttcaagacttttgttatcgcattggctcgattctgctggtgctgttaatggggcttgcacttttcaatgatttctctcggttatgagagttagttaggaagaacgcataataacgatggcgatgaaaaagttgctcatagcgtcgctgctgtttagcagcgccaccgtatacggtgctgaagggttcgtagtgaaagatattcatttcgaaggccttcagcgtgtcgccgttggtgcggcactcctcagtatgccggtgcgcacaggcgacacggttaatgatgaagatatcagtaataccattcgcgctctgtttgctaccggcaactttgaggatgttcgcgtccttcgtgatggtgatacccttctggttcaggtaaaagaacgtccgaccattgccagcattactttctccggtaacaaatcggtgaaagatgacatgctgaagcaaaacctcgaggcttctggtgtgcgtgtgggcgaatccctcgatcgcaccaccattgccgatatcgagaaaggtctggaagacttctactacagcgtcggtaaatatagcgccagcgtaaaagctgtcgtgaccccgctgccgcgcaaccgtgttgacctaaaactggtgttccaggaaggtgtgtcagctgaaatccagcaaattaacattgttggtaaccatgctttcaccaccgacgaactgatctctcatttccaactgcgtgacgaagtgccgtggtggaacgtggtaggcgatcgtaaataccagaaacagaaactggcgggcgaccttgaaaccctgcgcagctactatctggatcgcggttatgcccgtttcaacatcgactctacccaggtcagtctgacgccagataaaaaaggtatttacgtcacggtgaacattaccgaaggcgatcagtacaagctttctggcgttgaagtgagcggcaaccttgccgggcactccgctgaaattgagcagctgactaagatcgagccgggcgagctgtataacggcaccaaagtgaccaagatggaagatgacatcaaaaagcttctcggtcgctatggttatgcctatccgcgcgtacagtcgatgcctgaaattaacgatgccgacaaaaccgttaaattacgcgtgaacgttgatgcgggtaaccgtttctacgtgcgtaagatccgttttgaaggtaacgatacctcgaaagatgccgtcctgcgtcgcgaaatgcgtcagatggaaggtgcatggctgggaagcgatctggtcgatcagggtaaggagcgtctgaatcgtctgggcttctttgaaactgtcgataccgatacccaacgtgttccgggtagcccggaccaggtagatgtagtctacaaggtgaaagaacgtaacaccggtagcttcaacttcgggattggttacggtactgaaagtggcgtgagcttccaggctggcgtgcaacaggataactggttaggtacaggttatgctgttggtatcaacgggaccaaaaacgattaccagacctatgctgaattgtcggtaaccaacccgtacttcactgtagatggtgtaagcctcggtggtcgtctcttctataatgacttccaggcagatgacgccgacctgtccgactataccaacaagagttatggtacagacgtgacgttgggcttcccgatcaacgaatataactcgctgcgtgcaggtctgggttatgtacataactccctgtccaacatgcagcctcaggttgcgatgtggcgttatctgtactctatgggtgaacatccgagcacctctgatcaggataacagcttcaaaacggacgacttcacgttcaactatggttggacctataacaagcttgaccgtggttacttcccgacagatggttcacgtgtcaacctgaccggtaaagtgaccattcctggatcggataacgaatactacaaagtgacgttagacacggcgacttatgtgccgatcgatgacgatcacaaatgggttgttctggggcgtacccgctggggttatggtgatggtttaggcggcaaagagatgccgttctacgagaacttctatgccggtggttccagcaccgtgcgtggcttccagtccaatacaattggtccgaaagcagtttacttcccgcatcaggccagtaattatgatccggactatgattacgaatgtgcgactcaggacggcgcgaaagacctgtgtaaatcggatgatgctgtaggcggtaacgccatggcggttgccagcctcgagttcatcaccccgacgccgtttattagcgataagtatgctaactcggttcgtacttccttcttctgggatatgggtaccgtttgggatacaaactgggattccagccaatattctggatatccggactatagtgatccaagcaatatccgtatgtctgcgggtatcgcattacaatggatgtccccattggggccgttggtgttctcctacgcccagccgttcaaaaagtacgatggagacaaggcagaacagttccagtttaacatcggtaaaacctggtaagtgttctccacaaaggaatgtagtggtagtgtagcgatgactttaggcgatcaatataagatcgccgggccacgcaaagaactgcaccctccggtgcaaatgggatggtaaggagtttattgtgaaaaagtggttattagcggcaggtctcggtttagcactggcaacttctgctcaggcggctgacaaaattgcaatcgtcaatatgggcagcctgttccagcaggtagcgcagaaaaccggtgtttctaacacgctggaaaatgagttcaaaggccgtgccagcgaactgcagcgtatggaaaccgatctgcaggctaaaatgaaaaagctgcagtccatgaaagcgggcagcgatcgcactaagctggaaaaagacgtgatggctcagcgccagacttttgctcagaaagcgcaggcttttgagcaggatcgcgcacgtcgttccaacgaagaacgcggcaaactggttactcgtatccagactgctgtgaaatccgttgccaacagccaggatatcgatctggttgttgatgcaaacgccgttgcttacaacagcagcgatgtaaaagacatcactgccgacgtactgaaacaggttaaataagtaatgccttcaattcgactggctgatttagcgcagcagttggatgcagaactacacggtgatggcgatatcgtcatcaccggcgttgcgtccatgcaatctgcacaaacaggtcacattacgttcatggttaacccaaaataccgtgagcatttaggcttgtgccaggcgtccgcggttgtcatgacccaggacgatcttcctttcgcgaaaagtgccgcgctggtagtgaagaatccctacctgacttacgcgcgcatggcgcaaattttagataccacgccgcagcccgcgcagaacattgcacccagtgcggtgatcgacgcgacggcgaagctgggtaacaacgtatcgattggcgctaacgcggtgattgagtccggcgttgaactgggcgataacgtgattatcggtgccggttgcttcgtaggtaaaaacagcaaaatcggtgcaggttcgcgtctctgggcgaacgtaaccatttaccatgagatccagatcggtcagaattgcctgatccagtccggaacagtggtaggcgcagacggctttggttatgccaacgatcgtggtaactgggtgaagatcccacagattggtcgcgtaattattggcgatcgcgtggagatcggtgcctgcacaaccatcgatcgcggcgcgctggatgacactgttattggcaatggcgtgatcattgataaccagtgccagattgcacataacgtcgtgattggcgacaatacggcggttgccggtggcgtcattatggcgggcagcctgaaaattggtcgttactgcatgatcggcggagccagcgtaatcaacgggcatatggaaatatgcgacaaagtgacggttacgggcatgggtatggtgatgcgtcccatcactgaaccaggcgtctattcctcaggcattccgctgcaacccaacaaagtctggcgcaaaaccgctgcactggtgatgaacattgatgacatgagcaagcgtctgaaatcgcttgagcgcaaggttaatcaacaagactaacgttccatcttttgttcgccaaactttacggcctgtctcattcttacgattgcggcaggccgtgttattattgtcgtttcttatattttgacaggaagagtatcttgactactaacactcatactctgcagattgaagagattttagaacttctgccgcaccgtttcccgttcttactggtggatcgcgtgctggattttgaagaaggtcgttttctgcgcgcagtaaaaaatgtctctgtcaatgagccattcttccagggccatttccctggaaaaccgattttcccgggtgtgctgattctggaagcaatggcacaggcaacaggtattctggcgtttaaaagcgtaggaaaactggaaccgggtgagctgtactacttcgctggtattgacgaagcgcgcttcaagcgcccggtcgtgcctggcgatcaaatgatcatggaagtcactttcgaaaaaacgcgccgcggcctgacccgttttaaaggggttgctctggtcgatggtaaagtagtttgcgaagcaacgatgatgtgtgctcgtagccgggaggcctgatacgtgattgataaatccgcctttgtgcatccaaccgccattgtggaagagggcgcgtcaattggcgcgaacgcacacattggtcctttttgtatcgttggaccccatgtcgaaattggtgagggtaccgtactgaaatctcacgttgtcgtgaatggtcatactaaaattggccgcgataatgagatttatcagttcgcctccatcggcgaagttaaccaggatctgaaatatgctggcgaaccgacccgtgtggaaatcggcgatcgtaaccgcattcgcgaaagcgtcaccattcatcgtggcacagtccagggcggtggattgacgaaggtgggcagcgacaacttactgatgatcaacgcgcacattgcgcacgattgtacggtaggtaaccgctgtattctcgccaacaacgcaacgctggcgggtcacgtatcggttgacgacttcgcgatcatcggcggcatgaccgcagtccatcagttctgcatcattggtgcgcacgtgatggttggcggctgctccggtgtggcgcaggacgtccctccttatgtcattgcgcagggtaaccacgcaacgccgttcggtgtcaatatcgaagggctgaagcgccgcggattcagccgtgaggcgattaccgctatccgcaatgcgtataagctgatttatcgtagcggtaaaacgctcgatgaagtgaaaccggaaattgctgaactggcggaaacatatccggaagtgaaagcctttaccgatttctttgcacgctcaacgcgcggtctgattcgttaatgactgaacagcgtccattaacgattgccctggtcgccggagaaacctccggcgatatcctgggggccggtttaatccgcgctctgaaagaacatgtgcccaacgcccgctttgttggtgttgccgggccacgaatgcaggctgaaggctgcgaagcttggtacgaaatggaagaactggcggtaatgggcattgttgaagtgctcggtcgtctgcgtcgcttactgcatattcgtgccgatctgacaaagcgttttggcgaactgaagccagatgtttttgttggtattgatgcgcccgacttcaatattactcttgaaggtaacctcaaaaagcagggtatcaaaaccattcattacgtcagtccatccgtctgggcgtggcgacagaaacgcgttttcaaaataggcagagccaccgatctggtgctcgcatttctgcctttcgaaaaagcgttttatgacaaatacaatgtaccgtgccgctttatcggtcataccatggctgatgccatgccgttagatccagataaaaatgccgcccgtgatgtgctggggatccctcacgatgcccactgcctggcgttgctaccggggagccgtggtgcagaagttgaaatgcttagtgccgatttcctgaaaacggcccagcttttgcgccagacatatccggatctcgaaatcgtggtgccactggtgaatgccaaacgccgcgagcagtttgaacgcatcaaagctgaagtcgcgccagacctttcagttcatttgctggatgggatgggccgtgaggcgatggtcgccagcgatgcggcgctactggcgtcgggtacggcagccctggagtgtatgctggcgaaatgcccgatggtggtgggatatcgcatgaagccttttaccttctggttggcgaagcggctggtgaaaactgattatgtctcgctgccaaatctgctggcgggcagagagttagttaaagaattattgcaggaagagtgtgagccgcaaaaactggctgcggcgctgttaccgctgttggcgaacgggaaaaccagccacgcgatgcacgataccttccgtgaactgcatcagcagatccgctgcaatgccgatgagcaggcggcacaagccgttctggagttagcacaatgatcgaatttgtttatccgcacacgcagctggttgcgggtgtggatgaagtcggacgcgggccgttagttggcgcggtcgtcaccgctgcggtgatccttgacccggcgcgcccgattgccgggctgaatgattccaaaaagctgagcgaaaaacgccgtctggcgctctatgaagagatcaaagagaaagcgttgagctggagtctgggccgcgcggaaccccacgaaatcgacgagctgaacattcttcatgcgaccatgctggcgatgcagcgtgccgtcgctgggctgcatattgcgccggaatatgtgttgattgatggtaaccgctgcccgaaattaccgatgcctgcgatggctgtggtgaaaggcgatagccgcgtaccggaaatcagtgccgcgtctatcctggcgaaagtgacgcgtgacgccgaaatggcggcgctggatattgttttcccgcaatatggttttgcccaacacaaagggtacccaaccgcttttcatctggaaaaactggctgaacacggcgcgaccgaacaccatcggcgcagctttgggcctgtcaaacgcgcactgggacttgcgtcctgattcttgtgtcgagattaagtaaaccggaatctgaagatgtctgaaccacgtttcgtacacctgcgggtgcacagcgactactcgatgatcgatggcctggccaaaaccgcaccgttggtaaaaaaggcggcggcgttgggtatgccagcactggcgatcaccgatttcaccaacctttgtggtctggtgaagttctacggagcgggacatggcgcagggattaagcctatcgtcggggcagattttaacgtccagtgcgacctgctgggtgatgagttaacccacctgacggtactggcggcgaacaataccggctatcagaatctgacgttgctgatctcaaaagcgtatcagcgcgggtacggtgccgccgggccgatcatcgatcgcgactggcttatcgaattaaacgaagggttgatccttctttccggcggacgcatgggcgacgtcggacgcagtcttttgcgtggtaacagcgcgctggtagatgagtgtgtcgcgttttatgaagaacacttcccggatcgctattttcttgagctgatccgcaccggcaggccggacgaagaaagctatctgcacgcggcggtggaactggcggaagcgcgcggtttgcccgtcgtggcgaccaacgacgtgcgctttatcgacagcagcgactttgacgcacacgaaatccgcgtcgcgatccacgacggctttaccctcgacgatcctaaacgcccgcgtaactattcgccgcagcaatatatgcgtagcgaagaggagatgtgcgagctgtttgccgacatccccgaagctcttgccaacaccgttgagatcgccaaacgttgtaacgtaaccgtgcgtcttggtgaatacttcctgccgcagttcccgaccggggacatgagcaccgaagattatctggtcaagcgtgcaaaagagggcctggaagagcgtctggcctttttattccctgacgaggaagaacgtgttaagcgccgcccggaatatgacgaacgtctggagactgaacttcaggttatcaaccagatgggcttcccgggctacttcctcatcgttatggaatttatccagtggtcgaaagataacggcgtaccggtagggccaggccgtggctccggtgcgggttcactggtggcctacgcgctgaaaatcaccgacctcgatccgctggaatttgacctgctgttcgaacgtttccttaacccggaacgtgtctccatgcctgacttcgacgttgacttctgtatggagaaacgcgatcaggttatcgagcacgtagcggacatgtacggtcgtgatgcggtatcgcagatcatcaccttcggtacaatggcggcgaaagcggtgatccgcgacgtaggccgcgtgctggggcatccgtacggctttgtcgatcgtatctcgaaactgatcccgcccgatccggggatgacgctggcgaaagcgtttgaagccgagccgcagctgccggaaatctacgaagcggatgaagaagttaaggcgctgatcgacatggcgcgcaaactggaaggggtcacccgtaacgccggtaagcacgccggtggggtggttatcgcgccgaccaaaattaccgattttgcgccgctttactgcgatgaagagggcaaacatccggtcacccagtttgataaaagcgacgttgaatacgccggactggtgaagttcgacttccttggtttgcgtacgctcaccatcatcaactgggcgctggagatgatcaacaagcggcgggcgaagaatggcgagccgccgctggatatcgctgcgatcccgctggatgataagaaaagcttcgacatgctgcaacgctcggaaaccacggcggtattccagcttgaatcgcgcggcatgaaggacctgatcaagcgtctgcaacctgactgcttcgaagatatgatcgcactggtggcactgttccgccccggcccgttgcagtcagggatggtggataactttatcgaccgtaaacatggtcgcgaagagatttcctatccggacgtacagtggcagcatgaaagcctgaaaccggtactggagccaacctacggcatcatcctgtatcaggaacaggtcatgcagattgcgcaggtgctttctggttataccctcggtggcgcggatatgctgcgtcgtgcgatgggtaagaaaaagccggaagagatggctaagcagcgttctgtatttgctgaaggtgcagaaaagaacggaatcaacgccgaactggcgatgaaaatcttcgacctggtggagaaattcgcgggttacggatttaacaaatcgcactctgcggcctatgctttggtgtcatatcaaacgttatggctgaaagcgcactatccggcggagtttatggcggcggtaatgaccgccgatatggacaacaccgagaaggtggtgggcctggtggatgagtgctggcggatggggctgaaaatcctgccaccagatataaactccggtctttaccatttccacgtcaacgacgacggcgaaatcgtgtatggtattggcgccatcaaaggggtaggtgaaggtccgattgaggccatcatcgaagcccgtaataaaggcggctacttccgcgaactgtttgatctctgcgcccgtaccgacaccaaaaagttaaaccggcgggtgctggaaaaactgatcatgtccggggcgtttgaccgtcttgggccacaccgcgcggcgctgatgaactcgctgggtgatgcgttaaaagcggcagatcaacacgcgaaagcggaagctatcggtcaggccgatatgttcggcgtgctggccgaagagccggaacaaattgaacaatcctacgccagctgccaaccgtggccggagcaggtggtgttagatggggaacgtgaaacgttaggtctgtaccttacgggacaccctatcaaccagtatttaaaagagattgagcgttatgtcggaggcgtaaggctgaaagacatgcacccgacagaacgtggtaaagtcatcacggctgcggggctcgttgttgccgcgcgggttatggtcaccaagcgcggcaatcgtatcggtatctgcacgctggatgaccgttccgggcggctggaagtgatgttgtttactgacgccctggataaataccagcaattgctggaaaaagaccgcatacttatcgtcagcggacaggtcagctttgatgacttcagcggtgggcttaaaatgaccgctcgcgaagtgatggatattgacgaagcccgggaaaaatatgctcgcgggcttgctatctcgctgacggacaggcaaattgatgaccagcttttaaaccgactccgtcagtctctggaagcccaccgctctgggacaattccagtacatctctactatcagagggcggatgcacgcgcgcggttgcgttttggcgcgacgtggcgtgtctctccgagcgatcgtttattaaacgatctccgtggcctcattggttcggagcaggtggaactggagtttgactaatacaggaatactatgagtctgaatttccttgattttgaacagccgattgcagagctggaagcgaaaatcgattctctgactgcggttagccgtcaggatgagaaactggatattaacatcgatgaagaagtgcatcgtctgcgtgaaaaaagcgtagaactgacacgtaaaatcttcgccgatctcggtgcatggcagattgcgcaactggcacgccatccacagcgtccttataccctggattacgttcgcctggcatttgatgaatttgacgaactggctggcgaccgcgcgtatgcagacgataaagctatcgtcggtggtatcgcccgtcttgacggtcgtccggtgatgatcattggtcatcaaaaaggtcgtgaaaccaaagaaaaaattcgccgtaactttggtatgccagcgccagaaggttaccgcaaagcactgcgtctgatgcaaatggctgaacgctttaagatgcctatcatcacctttatcgacaccccgggggcttatcctggcgtgggcgcagaagagcgtggtcagtctgaagccattgcacgcaacctgcgtgaaatgtctcgcctcggcgtaccggtagtttgtacggttatcggtgaaggtggttctggcggtgcgctggcgattggcgtgggcgataaagtgaatatgctgcaatacagcacctattccgttatctcgccggaaggttgtgcgtccattctgtggaagagcgccgacaaagcgccgctggcggctgaagcgatgggtatcatcgctccgcgtctgaaagagctgaaactgatcgactccatcatcccggaaccgctgggcggcgctcaccgtaacccggaagcgatggcggtatcgttgaaagcgcaactgctggcggatctggccgatctcgatgtgttaagcactgaagatttaaaaaatcgtcgttatcagcgcctgatgagctacggttacgcgtaattcgcaaaagttctgaaaaagggtcacttcggtggtaatgccagtcagttaagcaactgactggctctttttcggggctgtggggtatttccagggcctctcctttaccactctcgggaaggccctttcccttctcgtcggtaatttcacaagttgtcccatacttgcaagatcgcgcatcagctccggtatacgtcccggtgaagcgccctgcaatgtcatcagcattctcatcaccattccgcatgattctgagaaactcagttgattcggccagtaacctttcagatgttccgccattttaatcatctgatatctcaccagattataagccagtaagacaccccacagctcttgctccacaagctccggctttttacttctcagcgtcagcctgctcagttgcatcgtctgttttatctccctgtatcccagttcgatttcccagcgatgactgtacagatccgccatttctcctccggggaagcgcatggcgtccgtcatcgacgtcagcagatggcagacttttcctttgcgcgtcacggtcagcaggcgggctgtcacttcatttcccagtcccggccacttttttcgtgcctgcgggctggttttcagcttcaccagatgatcgcctttacccagttttctgggctcttcatattgcgctccctttctgagaggtatcatccagtggcggtgttctcccgccaggctccaggcatttaacagtcccagtgagtaataacctttatccattaacgtcagagtgttatcgccggtttgttctataagttgctcagcaagctcattttcgctgttcttcatcgtgccgaaggctgcagccgtcagcaaatggctggtcagttccatctggcagaccattttgacctgcgggtagagcgccgggttcccggcatgtgtctggcgggggaaggctgcatcgttctctggtgtatccggtgtgcgccagaacacaccatcgatggccagcagggtcaggccgcaccagtgcggatgcggcgtggcgttatgccagagctgcgctgttttcgtgaacacgcggcggacagcctcacttcccaggcgctggcgggcctgaataacggcactgggggcaacgaaggggcgattgcccggcagcatgatgtccaggcgattcacaatctggtgaagaggttctttacgctcaagcgccatgccaacaatacaccagaccatcatttcgaggggaagacggcgcttgcgtagcgttacagtacctgattcggcaaggcaacgagagatgagttcggggtcgaggtaatcccccagagaagtcagtgggttacgcagagaatcgtaacgggataccagatcaagagcctgtccaatgtgcataaaaaaatccggaaacaagtgagcgtttccggattcttacacagccactggatcggtcaactgatccttaactgatcggcattagtcacttcggtggcccttttttatcgccacggtttgagcaggctatgattaaggaaggattttccaggaggaacacatgaacatcattgccattatgggaccgcatggcgtcttttataaagatgagcccatcaaagaactggagtcggcgctggtggcgcaaggctttcagattatctggccacaaaacagcgttgatttgctgaaatttatcgaacataaccctcgaatttgtggcgtgatttttgactgggatgagtacagtctcgatttatgcagcgatatcaatcaacttaatgaatatctcccgctttatgccttcatcaacacccactcgacgatggatgtcagcgtgcaggatatgcggatggcgctctggttttttgaatatgcgctggggcaggcggaagatatcgccattcgtatgcgtcagtacaccaacgaatatcttgataacattacgccgccgttcacgaaagccttgtttacctacgtcaaagagcggaagtacaccttttgtacgccggggcatatgggcggcaccgcatatcaaaaaagcccggttggctgcctgttttatgattttttcggcgggaataccctcaaggctgatgtctctatttcggtcaccgagcttggttcgttgctcgaccacaccgggccacacctggaagcggaagagtacatcgcgcggacttttggcgcggaacagagttatatcgttaccaacggaacatcgacgtcgaacaaaattgtgggtatgtacgccgcgccatccggcagtacgctgttgatcgaccgcaattgtcataaatcgctggcgcatctgttgatgatgaacgatgtagtgccagtctggctgaaaccgacgcgtaatgcgttggggattcttggtgggatcccgcgccgtgaatttactcgcgacagcatcgaagagaaagtcgctgccaccacgcaggcacaatggccggttcatgcggtgattaccaactccacctatgatggcttgctctacaacaccgactggatcaaacagacgctggatgtcccgtcgatccacttcgattccgcctgggtgccgtacacccattttcatccgatctaccaggggaaaagtggtatgagcggcgagcgtgttgcgggaaaagtgatcttcgaaacgcaatcgacccacaaaatgctggcggcgttatcgcaggcttcgctgatccacattaaaggcgagtatgacgaagaggcgtttaacgaagcctttatgatgcataccaccacctcgcccagttatcccattgttgcttcggttgagacggcggcggcgatgctgcgtggtaatccgggcaaacggctgattaaccgttcggtggagcgggcgctgcattttcgcaaagaggtccagcggttgcgggaagagtctgacggttggtttttcgatatctggcaaccgccgcaggtggatgaagccgaatgctggcccgttgcgccaggcgaacagtggcacggctttaacgatgcggatgccgatcatatgtttctcgatccggttaaagtcactattttgacaccggggatggacgaacagggcaatatgagcgaggaggggatcccggcggcgctggtggcaaaattcctcgacgaacgtgggatcgtagtagagaaaaccggcccttataacctgctgtttctctttagtattggtatcgataaaaccaaagcaatgggattattgcgtgggttgacggaatttaaacgctcttacgatctcaacctgcggatcaaaaatatgctacccgatctctatgctgaagatcccgatttctaccgcaatatgcgtattcaggatctggcgcaagggatccataagctgattcgtaaacacgatcttcccggtttgatgttgcgggcattcgatactttgccggaaatgatcatgacgccacatcaggcatggcagagacagattaaaggtgaagtagaaaccattgcgctggaacaactggtcggtagagtatcggcaaatatgatcctgccttatccaccgggcgtaccgctgttgatgccaggagaaatgctgaccaaagagagccgcacggtactcgattttctactgatgctttgttccgtagggcaacattaccccggttttgaaacggatattcacggcgcgaaacaggacgaagacggcgtttaccgcgtacgagtcctaaaaatggcgggataacttgccagagcggcttccgggcgagtaacgtgctgttaacaaataaaggagacgttatgctgggtttaaaacaggttcaccatattgcgattattgcgacggattatgcggtgagcaaagctttctactgcgatattcttggtttcacgctgcaaagcgaagtctatcgcgaagcgcgcgactcgtggaaaggggatttggcgcttaatgggcaatatgtgattgagcttttctcttttccgttcccgccggagcgccccagccgaccggaagcttgcggcctgcgtcatctggcttttagcgttgatgatatcgatgcggcagtggcgcaccttgaaagccataacgtgaagtgtgaagccatccgtgtcgatccatacacgcaaaaacgcttcacgttctttaacgatccggacgggctgccgttggaactgtatgagcagtaaggcttgtcatcgccgcatttgcccggtaacgtgccgggcattgctactgtaaaatcgcaccatcatgacactcacgctcaatagacaacttctcacctcacgccagattctggtggcctttagcggcgggcttgactccaccgttctgctgcatcagttggtgcagtggcggacggaaaatccgggcgtcactctacgcgctatccatgtgcatcatggtttaagtgctaatgccgatgcctgggttaggcattgcgagaacatctgccaacagtggcaggtgccgctggtggtcgagcgcgtgcaacttgcgcaagaaggactgggcattgaggcccaggcgcggcaggcgcgttatcaggcatttgctcgtaccctgttacccggtgaagtgctggtcaccgcgcaacatctcgacgatcaatgtgaaacctttctgctggcgctaaaacgcggtagcggccctgccgggctttcggctatgggggaagtttcggaatttgccggaacacggcttatccgcccgttgcttgcccgcacgcggggggaactggagcagtgggcattggcgcatggtttacgctggattgaagacgaaagtaatcaggacgactcatacgatcgtaactttctgcgcctgcgtgtagtgccgttattgcagcagcgttggccgcattttgccgaagcaacggcccgcagcgccgcactttgtgctgaacaagagagtctgttggatgaactgctggcggatgatttagcacactgccaaacgtcgcaggggacgctgcagattgcgccaatgctggcgatgagtgatgcccgtcgcgcggcgattatccgccgctggctggcagggcagaatgcaccgatgccttcccgcgacgcgctggtgcggatctggcaggaagtggcgctggcgcgggaagatgcctccccctgtttacgttttggcgcgtttgaaatacggcgctatcagtcgcaactgtggtggattaaatccgtcactgggcaaagcgaaaccattgtgccgtggcagacgtggctacaaccgctggaattaccggcggggctgggaagtgtacagcttactgcgggaggcgatattcgccctccgcgtgcagacgaagcggtcagcgtgcgtttcaaagcgccaggattgctgcatattgtcgggcgtaacggcggacgtaagctaaagaaaatctggcaagagctgggcgtgccgccgtggctacgtgacaccacgccactgctgttttatggcgaaacgctgattgcggcggcaggggtatttgtgacgcaagaaggtgtggctgaaggtgagaatggcgtaagttttgtctggcagaaaacgcttagttaagtgaaagccggataagacgcatcaaacgtcgcatccggcgaaagtcaatcaggattcgcttaccaccaccgtaccgatttccgggtggctaaagctggtaattttatccagacgcagctcgcgggtttcgccagcggcctcgacgaccagatactccacatttttgcgggagactaaatcactggcttttgcctgcaatttttcgccatctttcagctcaagtgtcagcattaaatgatgctggcaggcgagctcaagattatcgtaatcatcacaattgattggttgatacgcatcattcattgacataatcgctcaccagtaagtttgccgcagcgtatgctgctttttccctgacagcctcagaaagggcgtcgtcggcagccatttcattcagcactttcaaaacgcagcccagcgcgtccggaacgtatcctaagtctccgctggcgatttccgcgtaccgcttgcgtattaactcacaatatttttccacatgccctcctgtcagcactctgacttaaccgtggatgcaagtctaagcctacgaagataaactctgtttcgcaaggtgactataccacactcatttctgcaatatcagcgccgcaactgcacgtattccgttacaatggcctcctgattcgaaaggagttttcttatggcgcttaaagcgacaatttataaagcgacggttaatgtggccgatctcgaccgcaaccagtttctcgatgcctctctgacgctggcgcgccacccttcagaaacccaggagcgtatgatgctgcgcctgctggcgtggctgaaatatgctgatgaacgtctgcaatttacccgtggtttgtgtgccgattatgagccggaagcgtggctgcgtaacgatcacctgggcattgatttgtggattgagctggggctgccggatgagcggcggattaagaaagcctgcacccaggccgcaaaagtggcgctgtttacctataatagccgggcggcgcaaatctggtggcagcaaaatcagagcaaatgtgtgcagtttgccaatctttccgtctggtatctggacgatgaacaactggcgaaagtaagcgcctttgccgatcgtaccatgacgctgcaggcaacgattcaggatggcgtgatctggttatcggatgataagaataatctggaagtgaacttaaccgcctggcaacaaccttcatgattgtgatttcccgacatgttgctattcccgatggtgagcttgagatcaccgccattcgtgcgcagggcgcgggcgggcagcatgttaataagacctcaacggctattcatctgcgttttgacattcgggcgtccagcctgccagagtattacaaagagcgtctgctcgccgccagccatcatttgatcagcatgatggcgtaattgtcattaaggcacaggaataccgcagtcaggaactgaaccgcgaagcggcgctggcccggctggtggcagtgattaaagatttaacaacagaacaaaaagcccgacgacccacgcggcccacccgtgcatcgaaagagcgcaggctggcatagaaagcacaaaaatcaagcgtgaaggcgatgcgcggcaaagtacgcagcggtcgggaataaaaagaaggaatggatggtgaaaaaagcgatagtgacagcgatggctgtaatcagcctctttactctgatgggatgtaataatcgggccgaagtcgatacgctttctccggcgcaggctgccgaactaaaaccgatgccgcaaagttggcgcggcgtgctgccgtgtgccgattgcgaagggatcgaaacctctctgttcctcgaaaaagacggaacatgggtgatgaatgagcgttatctcggtgctcgtgaagaaccttcctccttcgcttcctacggtacatgggcgcgaaccgctgacaagctggtattaaccgacagcaaaggtgaaaagtcatattatcgggcgaaaggcgatgcgctggagatgctcgatcgtgaaggcaatccaattgaatcgcagttcaactatacgctggaaccggcacaatccagtttacctatgacgccgatgaccctgcgaggcatgtatttttatatggctgatgcggcgaccttcactgattgcgcgaccggaaaacgtttcatggtagcgaataacgcagagctggagcgtagctacctggctgcgcgcggtcacagtgaaaaaccggtgttactgtcagtagaaggtcactttacgcttgaggctaatccggatactggtgcgccaaccaaagtattagcgcccgatacggcgggtaaattttacccgaataaggattgcagtagtttggggcagtaaacctgcttaaggcagaaacaaacgcaaaattgcctgatgcgctgcgcttatcaggcctacagcatataatgcaacattttgaattagcacgattttgtaggccggataaggcgttcacgacgcatccggcattttgtgcacgaggctggctttatcactgagtcagcccaacaaagcgacccgccttgatataaatccctggcttcaggtgcccaacatactgtaactgcgtttctggcttaaacgcagagacatcgccagtacgcatatgcatcagatcggcagggctaatccagcctgattgcgccagcgtaagcggatgcccggctttggcaaatgcatcagtgacaaattccgaacaaaaccacgactttttgtctccttcgcccacactgcttaactgcgctttcgccaggccgctgacgcactgttggcgaaaatcctcggagaacggattcagtgagcacatctggcgagtcaccataaagggaataaattcgacaatgccgcgatagttataactgctatctttgattttattggcaaacgcggtgatatctgtggcttgttgcggggtaagatccgggactcgtaagacgaaaagcttatcactatgcttcatcgcttttttaagggaaacgatctggacgccagcgcctgtcgcttctgcaacgttattatcacccagatagattgcaacgtgactcacagaggaagtgctgaagacgcggattccaaatgaggttaccccaaggcttgaggagaacagcaaatcgccgggtttgagatcaggtaccgttatttcttttattgattgttcggtgaaagagctttgatgctggaatttgacagcccatgtttttgcctcggcatctactgctgtggctgatgggtctggctggctgatatcaacggtacaagccgaaagtaaaagaaagctggggagaagcaggcggcagtacgcctttggtttatccattttatacaatccatgtaaaaaagggccctgaaattcaggaccctttctggcatcagcctttaatctgtttcaccagatattcgacgatgtcaccagtcttaattaactgtttctcgccgttgcgacgatatttatattcgatatcgtcgttgtcgaggttacggtcgcccagcacaatagtgtgcggaataccgatcagttccatatcagcaaacatcacgcccggacgctctttgcggtcatccagcagcacttcgataccttgtgcacgcagttcgctgtacagtttctcagcaagctcttgtacgcggaaggatttgtgcatgttcatcggcagaatcgccacctggaacggcgcgatagcgtcaggccatacgatgccgcgttcgtcgtagttctgctcaatcgccgcagctaccacacgcgttaccccgataccgtagcaacccatcgtcaggatttggttacggccatcttcaccctgtacggaggctttcagtgcttcggagtacttggtacccagctggaagatgtgaccaacttcgataccacgtttgatcagcagcgtaccctggccatccgggcttggatcgccagccaccacgttacggatatctgcaacttccggggtagcgacatcgcgatcccagttgataccgaagtagtgtttaccatcgatgttagcaccagcagcgaaatcactcatcgccgcaacggtacggtcaatcaccaccggaatcggcatgtttaccggacccagtgaacccggaccggctttaaccacagcacgaatttcttcttcggtcgcgaaagtcagcgggcttgcaacctgcggcagtttttctgctttaacttcgttcagctcgtgatcaccgcgcaccagcagcgcaaccagcgggaagctgctgccttcaaccgctttaaccagcagagtcttaaccgttttctcaatcggcagattgaactgttcaaccagttccgcgatggttttcgcgttcggcgtatcaaccagcgtcatttcctgggtagcagcagcgcgcggttctttcggcgcgatagcttctgccagttcaatgttcgctgcatagtcagaggtgtcggagaagaccacatcgtcttcaccgctctgcgccagcacctggaattcgtgagaggcgctgccgccgatagaaccggtgtcggcttgcacggcgcggaaatccagccccatgcggctgaagattttgctgtaggccgcatacattgcatcgtaggtttcctgcagggattcctgagaagtatggaaagagtaagcatctttcatcaggaattcgcgggaacgcatgacgccgaaacgcggacgcacttcgtcgcggaacttggtctggatctgatagaagttcagcggcagctgtttgtaagagctaagctcgttacgaatcaggtcagtgataacttcttcatgagttgggccgagtacgaacggacgctcgccacggtcaacaaaacgcagcagttccggaccgtactgttcccaacgaccactctcttgccacaaatcggctggctgaaccaccggcatcgacacctcgattgcaccggcgttgttcatctcttcacgcacgatgttttcgacttttttcagaacgcgcacgccggtcggcagccaggtatataacccggaggccagcttgcggatcatcccggcgcgcagcatcagctgatggctgatcacctcggcgtcggcaggtgtctccttgagagtggagagcaggtattggctagtacgcatgttgttacggttccagttggaaggtagaacaggctcaaggcgagcctgggacaaaaaaagtgatttagtttaccagtgcaaaagaaatgtcaaaagagaagggcgtgaatttaacgcggttccagcgcaaagacttcaaaacctgcgtcggtgacgcgccagcgaacgttaaaatcatgtagccagacggcataggttttgcccgtttcctcacctttacgataggccgggcgcgggtcctgcgccagtacttcgcggataaacagcgttaactgcggataacgcttctccagcgtcaaaagctgcttttcgacctctgcggtaaaactcaccgccatctctgcagctggcgcactttgcgcatagctggcactggcatcgggaagcgattcggcaaaggggagatacggtttgatatccactaccggcgtaccatcgaccagatccagactgccgagcttcagaatcacgctgtctttatggcaaacaacctctttcagctctaccagcgacataccaattgggttagggcggaaagtagagcgtgttgcgaaaacccccattctggcgttaccgccgaggcgcggtggacgcacagtcggacgccagccgccttccatcgtttgatgaaagacgaaaaggatccataaatggctgaacgcttccaggccgcgaacggcgtcggcctggttgtagggagcaatgagatgcagttcgccgttggcgctttttaccagaccaggctggcgcggaacggcgaatttttctttatagggcgagcgaataacgcctatttgctcgaactggaaactgctcatttcgccgtaatgttaagcgcagagccgatacatacagcctgacgatagcagcctagcgtaccgctggtgacttcgcagctatgcagtaataccgcattggctttcattttagaggcgttgatttgcatccgcttacgcgcggttggaatgctcggcggagagtcctgattagaggcctggcaagagtcgccactgacttcaccgagatcgcggaacggtttgccgactaattcttctgcattggtataaattcggaccggcgtggcgcgcggcgctttcggttttgcaggctccgctttcggctggggtgcagtgctttgaacgggttcgacaggggatctgcttaacatggaacagccgcttagcatgagtgctactaaacagatcggtaaagcacgcatagtatttcctcaatgtatgatcaaaacgtcaatattgaatcaggagcttgtaaaaatgacaagacgggcaagcgcccgtcctgaatgatattacaaattgtggaaacagcctaaaaattaccagcctttaacagcgccgccgttaaacactttgtttgctgcttcgtaaacttcatcagactgataagcctggacgaatttcttcacgttctcggcgtctttgttatcttcacgcgttacgatcaggttcacgtacggggagtctttatcttcgacaaagataccgtctttcgctggagtcaggccaatctggctggcataggtggtattgataactgccagagcgatttgcgcgtcgtccagagatcgaggcagctgcggtgcttccagctcaacaattttcagattttttgggttctcaacaacatcaagaacggtcggcagcaggccaacgccatctttcagtttgatcaagcccactttttgcagcagcagcagtgaacgaccaagattagttggatcgtttggcacggcaacctgcgaaccatcctgcagttcatccagtgatttgattttcttggagtaaccagcaatcggataaacaaaagtgttgcctactgcgaccagtttgtagccacgatctttcagttgctgatcaaggtacggtttatgctggaaggcgttggcgtcgatatcgcctttgctcaatgcttcgtttggcagaacatagtcgttgaaggttaccagctcaacgtccaggccatatttgtctttcgcaactttctgcgcgacttctgctacctgctgttcggcaccaacaatcacgccgactttaatgtggtttggatctttttcatcctgaccgcagcctaccagtgccagtgatccaatcagggctcccactgccgcaaaggttttgaatttgaacgccataccttattccttcttcaattatttatgttgtgttgaacgttacttgcgagtgacagcccggacgatgcggtcgcctgcgaactgaattaaataaaccagaatgaccagcaataccagtaccgtattcatcaccgtcgcgttgtagccgatgtagccatactgatagccaatctgacctaaaccaccggcaccgactgcaccacccatcgcggaataaccgaccagggtaatcagggtgatagttgccgcattcaccagacccggcaacgcttccggtaacagcactttacggacgatctgcattggcgtggcacccattgcgcgggaagcttcaattaacccggttgggatctccagcagagcgttctcgaccatacgggcaataaacggtgctgcaccaacggttaacggaacaattgctgcctgcaaaccaatcgatgtaccgacaataacgcgggtaaacggaatcatccataccagcaagataatgaacgggatggaacggaaaatgttcacaatcgcagaaacggtacgatacagcttcgcgttagcaataatttgccccggacgcgtgacataaagcagaacgccaaccggcagaccaatcacaaagccaaaaaatccggatacgaaggtcattgccagcgtttcccatacgccacgaaccagcagccacatcatcggctcagacataacccagtacctctacttttacatggtgttcctgcagccaggcaatggcggcttgcgtatcttgttgtgtgccgtgcatttcagtcagcatgatgccgaatttaacgccaccggcgtagtccatctgcgcgctaataatgttgttgttgacgttgaaacgacgcgcggtttcagaaagcagtggggcatcgaccgattgaccggtaaactccagacgcagcatcggcacgcagtcagtaaatggctccgcttgcagacgttcctggtaatcttccgggatatccagatgcagggtcgactgaataaacttctgcgccagcggcgttttcggatgcgagaacacttcacttaccgtgtcctgctcgatcagttcgccattgctgatgaccgccacgcaatcacaaatacgcttcacaacgtccatttcgtgggtgatcaacagaatcgtcaaacccagacggcggttaatgtctttcagcagttcgagaatagaacgtgtcgttgccgggtccagcgcgctggtggcttcatcacacagcaatactttgggattgctggctaatgcacgggcaatcgccacacgttgtttctgcccaccggaaagattcgacgggtagctatcatgcttatcgccaagaccaaccaatgacagcaattccgtcacgcgacgtttgatctcgtctttcggtgtgttgtccagctccagcggcagagccacgttgccaaaaacagtacgcgaagagagcaggttaaaatgctggaaaatcataccaatctggcggcgagctttggtcaactcggattctgacagcgtggtcaattcttggccatcgaccagcacgctaccctcggttgggcgctccagcaggtttacacaacgtataagcgtactcttacccgcgcctgaggcaccgataacgccataaatttgtccagctggcacatgcaggctgacgttgttcaacgcctggatggtgcgggtgccctggtggaacactttggtgatattcgaaagttttatcattgattatttattatcgtcattaagttagtcgtggcatctcgaatgcctgaaacgggcaacgccgtcaatgaaatggatgttaaggcatccagacgtctaaatcaatcaggtttatgcgaagagcactttcttgcaggtcgaaacatgcgatactagcgtcccatgccttattaaggagctataaaaggtggcgaagagcgtacccgcaatttttcttgaccgtgatggcaccattaatgtcgatcacggctatgtccatgagatcgacaactttgaatttatcgacggtgttattgacgccatgcgcgagctaaaaaaaatgggctttgcgctggtggtagtaaccaaccagtctggcattgctcgcggtaaatttaccgaagcacagtttgaaacgctgaccgagtggatggactggtcgctggcggaccgagatgtcgatctggatggtatctattattgcccgcatcatccgcagggtagtgttgaagagtttcgccaggtctgcgattgccgcaaaccacatccggggatgcttttgtcagcacgcgattatttgcatattgatatggccgcttcttatatggtgggcgataaattagaagatatgcaggcagcggttgcggcgaacgtgggaacaaaagtgctggtgcgtacgggtaaacctattacacctgaagcagaaaacgcggcagattgggtgttaaatagcctggcagacctgccgcaagcgataaaaaagcagcaaaaaccggcgcaatgattaaaagatgagcggttgaaataaaaatgcatttttccgcttgtcttcctgagccgactccctataatgcgcctccatcgacacggcggatgtgaatcacttcacacaaacagccggttcggttgaagagaaaaaatcctgaaattcagggttgactctgaaagaggaaagcgtaatatacgccacctcgcgacagtgagctgaaagctgcgtcgcaactgctctttaacaatttatcagacaatctgtgtgggcactcgaagatacggattcttaacgtcgcaagacgaaaaatgaataccaagtctcaagagtgaacacgtaattcattacgaagtttaattctttgagcatcaaacttttaaattgaagagtttgatcatggctcagattgaacgctggcggcaggcctaacacatgcaagtcgaacggtaacaggaaacagcttgctgtttcgctgacgagtggcggacgggtgagtaatgtctgggaaactgcctgatggagggggataactactggaaacggtagctaataccgcataatgtcgcaagactaaagagggggaccttcgggcctcttgccatcggatgtgcccagatgggattagctagtaggtggggtaacggctcacctaggcgacgatccctagctggtctgagaggatgaccagccacactggaactgagacacggtccagactcctacgggaggcagcagtggggaatattgcacaatgggcgcaagcctgatgcagccatgccgcgtgtatgaagaaggccttcgggttgtaaagtactttcagcggggaggaagggagtaaagttaatacctttactcattgacgttacccgcagaagaagcaccggctaactccgtgccagcagccgcggtaatacggagggtgcaagcgttaatcggaattactgggcgtaaagcgcacgcaggcggtttgttaagtcagatgtgaaatccccgggctcaacctgggaactgcatctgatactggcaagcttgagtctcgtagaggggggtagaattccaggtgtagcggtgaaatgcgtagagatctggaggaataccggtggcgaaggcggccccctggacgaagactgacgctcaggtgcgaaagcgtggggagcaaacaggattagataccctggtagtccacgccgtaaacgatgtcgacttggaggttgtgcccttgaggcgtggcttccggagctaacgcgttaagtcgaccgcctggggagtacggccgcaaggttaaaactcaaatgaattgacgggggcccgcacaagcggtggagcatgtggtttaattcgatgcaacgcgaagaaccttacctggtcttgacatccacagaactttccagagatggattggtgccttcgggaactgtgagacaggtgctgcatggctgtcgtcagctcgtgttgtgaaatgttgggttaagtcccgcaacgagcgcaacccttatcctttgttgccagcggtccggccgggaactcaaaggagactgccagtgataaactggaggaaggtggggatgacgtcaagtcatcatggcccttacgaccagggctacacacgtgctacaatggcgcatacaaagagaagcgacctcgcgagagcaagcggacctcataaagtgcgtcgtagtccggattggagtctgcaactcgactccatgaagtcggaatcgctagtaatcgtggatcagaatgccacggtgaatacgttcccgggccttgtacacaccgcccgtcacaccatgggagtgggttgcaaaagaagtaggtagcttaaccttcgggagggcgcttaccactttgtgattcatgactggggtgaagtcgtaacaaggtaaccgtaggggaacctgcggttggatcacctccttaccttaaagaagcgttctttgcagtgctcacacagattgtctgatgaaaatgagcagtaaaacctctacaggcttgtagctcaggtggttagagcgcacccctgataagggtgaggtcggtggttcaagtccactcaggcctaccaaatttgcatcgcaaatttgaagaggttttaactacatgttatggggctatagctcagctgggagagcgcctgctttgcacgcaggaggtctgcggttcgatcccgcatagctccaccatctctgtagtgattaaataaaaaatacttcagagtgtacctgcaaaggttcactgcgaagttttgctctttaaaaatctggatcaagctgaaaattgaaacactgaacaatgaaagttgttcgtgagtctctcaaattttcgcaacacgatgatgaatcgcaagaaacatcttcgggttgtgaggttaagcgactaagcgtacacggtggatgccctggcagtcagaggcgatgaaggacgtgctaatctgcgataagcgtcggtaaggtgatatgaaccgttataaccggcgatttccgaatggggaaacccagtgtgattcgtcacactatcattaactgaatccataggttaatgaggcgaaccgggggaactgaaacatctaagtaccccgaggaaaagaaatcaaccgagattcccccagtagcggcgagcgaacggggagcagcccagagcctgaatcagtgtgtgtgttagtggaagcgtctggaaaggcgcgcgatacagggtgacagccccgtacacaaaaatgcacatattgtgagctcgatgagtagggcgggacacgtggtatcctgtctgaatatggggggcccatcctccaaggctaaatactcctgactgaccgatagtgaaccagtaccgtgagggaaaggcgaaaagaaccccggcgaggggagtgaaaaagaacctgaaaccgtgtacgtacaagcagtgggagcacgcttaggcgtgtgactgcgtaccttttgtataatgggtcagcgacttatattctgtagcaaggttaaccgaataggggagccgaagggaaaccgagtcttaactgggcgttaagttgcagggtatagacccgaaacccggtgatctagccatgggcaggttgaaggttgggtaacactaactggaggaccgaaccgactaatgttgaaaaattagcggatgacttgtggctgggggtgaaaggccaatcaaaccgggagatagctggttctccccgaaagctatttaggtagcgcctcgtgaattcatctccgggggtagagcactgtttcggcaagggggtcatcccgacttaccaacccgatgcaaactgcgaataccggagaatgttatcacgggagacacacggcgggtgctaacgtccgtcgtgaagagggaaacaacccagaccgccagctaaggtcccaaagtcatggttaagtgggaaacgatgtgggaaggcccagacagccaggatgttggcttagaagcagccatcatttaaagaaagcgtaatagctcactggtcgagtcggcctgcgcggaagatgtaacggggctaaaccatgcaccgaagctgcggcagcgatgcttatgcgttgttgggtaggggagcgttctgtaagcctgcgaaggtgtgctgtgaggcatgctggaggtatcagaagtgcgaatgctgacataagtaacgataaagcgggtgaaaagcccgctcgccggaagaccaagggttcctgtccaacgttaatcggggcagggtgagtcgacccctaaggcgaggccgaaaggcgtagtcgatgggaaacaggttaatattcctgtacttggtgttactgcgaaggggggacggagaaggctatgttggccgggcgacggttgtcccggtttaagcgtgtaggctggttttccaggcaaatccggaaaatcaaggctgaggcgtgatgacgaggcactacggtgctgaagcaacaaatgccctgcttccaggaaaagcctctaagcatcaggtaacatcaaatcgtaccccaaaccgacacaggtggtcaggtagagaataccaaggcgcttgagagaactcgggtgaaggaactaggcaaaatggtgccgtaacttcgggagaaggcacgctgatatgtaggtgaagtcccttgcggatggagctgaaatcagtcgaagataccagctggctgcaactgtttattaaaaacacagcactgtgcaaacacgaaagtggacgtatacggtgtgacgcctgcccggtgccggaaggttaattgatggggtcagcgcaagcgaagctcttgatcgaagccccggtaaacggcggccgtaactataacggtcctaaggtagcgaaattccttgtcgggtaagttccgacctgcacgaatggcgtaatgatggccaggctgtctccacccgagactcagtgaaattgaactcgctgtgaagatgcagtgtacccgcggcaagacggaaagaccccgtgaacctttactatagcttgacactgaacattgagccttgatgtgtaggataggtgggaggctttgaagtgtggacgccagtctgcatggagccggccttgaaataccaccctttaatgtttgatgttctaacgtggacccgtgatccgggttgcggacagtgtctggtgggtagtttgactggggcggtctcctcctaaagagtaacggaggagcacgaaggttggctaatcctggtcggacatcaggaggttagtgcaatggcataagccagcttgactgcgagcgtgacggcgcgagcaggtgcgaaagcaggtcatagtgatccggtggttctgaatggaagggccatcgctcaacggataaaaggtactccggggataacaggctgataccgcccaagagttcatatcgacggcggtgtttggcacctcgatgtcggctcatcacatcctggggctgaagtaggtcccaagggtatggctgttcgccatttaaagtggtacgcgagctgggtttagaacgtcgtgagacagttcggtccctatctgccgtgggcgctggagaactgaggggggctgctcctagtacgagaggaccggagtggacgcatcactggtgttcgggttgtcatgccaatggcactgcccggtagctaaatgcggaagagataagtgctgaaagcatctaagcacgaaacttgccccgagatgagttctccctgaccctttaagggtcctgaaggaacgttgaagacgacgacgttgataggccgggtgtgtaagcgcagcgatgcgttgagctaaccggtactaatgaaccgtgaggcttaaccttacaacgccgaaggtgttttggcggatgagagaagattttcagcctgatacagattaaatcagaacgcagaagcggtctgataaaacagaatttgcctggcggccgtagcgcggtggtcccacctgaccccatgccgaactcagaagtgaaacgccgtagcgccgatggtagtgtggggtctccccatgcgagagtagggaactgccaggcatcaaattacgaagaatggcactgacctttgaggcagttcactactcgataagagagtaggacaaaagcgaaagcttttgaacgttgcgaagcaacggcccgaagggtgaatcacgaagtgattcataaactgccaggcatcaaattaagcagtaagccggtcataaaaccggtggttgtaaaagaattcggtggagcggtagttcagtcggttagaatacctgcctgtcacgcagggggtcgcgggttcgagtcccgtccgttccgccacttattaagaagcctcgagttaacgctcgaggttttttttcgtctgtatatctattattgccagaatcgcaaaaatcctctgcattttatgctctttttccgcaacagtctgaagcccataatcacctcagttaacgaaaatagcattaaaagaggcatattatggctatccctgcatttggtttaggtactttccgtctcaaagacgacgttgttatttcatctgtgaaaacggcgcttgaacttggttatcgcgcaattgatactgcacaaatctatgataacgaagccgcagtaggtcaggcgattgcagaaagtggcgtgccacgtcatgaactctacatcaccactaaaatctggattgaaaatctcagcaaagacaaattgatcccgagtctaaaagagagcctgcaaaaattgcgtaccgattatgttgatctgacgctaatccactggccgtcaccaaacgatgaagtctctgttgaagagtttatgcaggcgctgctggaggccaaaaaacaaggtctgacacgtgagatcggtatttccaacttcacgatcccgttgatggaaaaagcgattgctgctgttggcgctgaaaacatcgctaccaaccagattgaactctctccttatctgcaaaaccgtaaagtggttgcctgggctaaacagcacggtattcatatcacttcctatatgacgctggcttatggtaaggcactgaaagatgaggttattgctcgtattgcagctaaacacaatgcgactccggcacaagtgattctggcgtgggctatgggggaaggttactcagtaattccttcttctactaaacgtaaaaacctggaaagtaatcttaaggcacaaaatttacagcttgatgccgaagataaaaaagcgatcgccgcactggattgcaacgaccgcctggttagcccggaaggtctggctcctgaatgggattaagcctctctgacagctcctccgggagctgtttttacatgctcgctaaggaaatcgataaaagcccggatgcgcgtacttaccgcacggtcgctgtaatagacggcactgaatggcatttccactggcaacactttatctgccattaactccaccaattctccgcgagcgatttctttgtcgatcatgtagtcggacaaacacgcaatcccgttgccactcaggcaaagctgtttcagtgtttccccactattggatgacaaaccgtacttcacctcatgtaattgtccatcactacaggctatcggccaggtattgagggaagcgggttcagtgaatcccaggcaaacatgttgctttaaatcgtcgatcgtttctggcttcccgtagcgggaaatataatcgggggaggcgataatttttcgataactgttaaataacggcctggcacgtaagctggagtccgttaacgtaccagcgcgtatcgcgacatccacttttctttcgatcaaattaataatcgtttcggaggagactagcgataaagtgacttccggatagcgttcacggaaaggcttaattaacggcatcagaaagtgcagcaccactggagttgcggcatcgatccgtaacagtccacgcggtgtattacgcgtctccataatttctgattctgccgctgccatctcctgcaaaattgactgtacgcgacgaaaataacgctcgccttcttccgtcaggctaagttgccgcgtggtccgattaagcaggctaacgccaagtttcatttccagctttttcaccgcccggcttaccgctgagtttgcttgccctaattgttccgctgcccggctaaagctgccgctttcgacgaccgaaacaaaaatggcgagttcttccgacgtggctttcatttttgctcctgttgcaaaatagatgagatattttgaatttatttgtcattaaaccatcaggatgcgtgatatgtcatccgatttaatgttctcaataatgagcaaatttctgaccggtgtaagcacttgcttacataacaatatacaattgctcgttgaaagagtgagctaaaatccctataacagtagaaccctcccgagtgcggaagggttgacgtaatagaggtttcaaagtcaaaagtgcgaaaaaacacctatgccatgcgctatgttgccggacaacctgcggagaggatcttaccgccggggtcttttgcgagcatcggccaggcattaccacccggagaaccgttaagtaccgaagagcgtattcggatcctggtgtggaacatatacaaacagcaacgcgctgaatggttgtcggtattaaagaattacggcaaagacgcacatctggtgttattgcaggaagcgcaaacaacgccagagttggtacagtttgcgaccgctaactatcttgccgccgatcaggtacccgctttcgtgctgccacaacatccttctggcgtaatgaccctttcggcggcacatccagtgtattgctgcccgttacgtgaacgagaacccattttgcgtctggcgaagtcggcactggtgacggtctatccattacctgacacccgcctgttgatggtggttaatatacacgccgtcaacttcagtctgggcgtggatgtctatagtaagcagttacttcctattggtgatcagatagctcaccacagcggcccggtcattatggcgggagatttcaatgcctggagccgtagaaggatgaacgcgttatatcgctttgcgcgggaaatgtcgctgcgccaggtgcgttttaccgatgatcagcgccgtcgggcgtttggtcgcccgctcgattttgttttctaccgtggtctgaacgtcagtgaagcttctgtactggttacgcgcgcttccgatcacaatccgctactcgttgaattcagtcccggcaagcctgataaataaggtatgtcaggtctgccgcagggcagaccaacgtttggcgctgcgcaaaacgtgagcgcggtggtggcgtatgacttatctgcccacatgctggatgtcgtggcacaagctgccgaagcccggcaactgaaaaatatcaccacccgccagggatatgccgcaagtctgccatttgccgataacgcatttgatattgttatcagccgttattctgcccatcactggcatgatgttggtgcagcactgcgagaagtgaataggatattgaaacctggcggtaggctgattgtgatggatgtaatgtctccgggtcacccagtgcgcgacatctggttacaggcggtagaagcattacgcgatacctctcacgtacgaaactacgccagcggtgcgtggttgacgttaatcaatgaagccaatctgatagttgataatttaattacagataagttaccgctggaattttcttcatgggtcgtgagaatgcgtacgccagaagcgttagtagacgctattcgcatttaccaacagagcgcatcgacagaggtgagaacgtatttttccttgcagactgatggctctttcaccagtgatatcatcatggtagaagcacataaagcggcataaataaaaaaggcaccgggggaatcggtgccttttttattatctggtttgtcaggaatctggcatgttgttgtttttcacaaacaacgtcagcttatcgcctggttgcagattcgcagtgtcgctgttccagcgcatcacatctttgatgttcacgccgtggcgtttagcaatgcttgaaagcgaatcgcctttgcgcacacgatacgtaatgctatcgctgttgtttgccaaccgctgtgcgctactgcctgcaccaatcgtcaaactttggcctggcttcagcttagatccgcgcagtttgttccactgctgcaaatctttggtgcttacgccgagacgtgaagcgatgcttgaaagcgtgtcgccagagcgtacggtgtaaacacggctgttaagcggcgtattgtcggcaaccagcgtcgactgtacagcagcaatttcgcctgaagcgagagattcacgcagttgatctgcatgcttctttggcaccatcacgtactgcggcccacttgcgcccagcgtggagcctttcacgccagcgttgaatgtcttcagcttgctgacggaaatccccgccatatctgcaaccttcgccatttcaaccgggctactcaggtgcacacgcgccagagcacggctttcatcggtcgttggcagacgtacgccataacgcttgctgtttttgagaatatcactcaatgccagcattttaggcacgtactgcttcgtttcctgcggcaacggtaacgaccagaagtccgtggatttcccacgcgctttgttcgttttaattgccttcatgacccgaccttcgccgctgttataagccgctacggtcagaagccagtcgccgtcaaacattttgttcagacgctgcatcatattcagcgcggcagttgttgaagcaacaacatcgcgacgcgcgtcataattgcgggtctgtttcaaaccataattgcgccccgtgctcggaatgatctgccagatgcctgcggcattggcgccagacgttgcgtgaggatcaaaagcgctctccactatgggtagtagtaccagttccataggcatgttacgttttttaacttgccctgctatccagtacatatacggctctgcccgtaaagttacatcgtggagatagctcttattgcgtaaatatttctgtttctgttcgcgaatccggtcattttccggaattcccatctttagctcgtcgccaatgaaagcccacaagtcaccatctggcgcgatagacgtcccatcgtccatccatcgtgcctgacttgtaaactttgctgcttccccttgaccagctgcagaaaggctctgtgcgtgctgttgaacgttgccggtactctggcaacccacgagcaggacagaggcgagtaatatcgcttttgccttcatgtgtgtgtcaatagttgcttaaaagacgaccgatcataacggcgaacggagccgatgacaagaaagttttatcagaacctatctttctttgaccttaaccatgcaaaacgctcttcaggttgttgcaataatgtttcttcattaattacattaattaaatcaatatcttccgttcttaaaaaaacattaatttgccgctcatttttcagaattacgggtagtgttatttgattttttgcccgtaactccttaactttacgataataatcatttatggacaaatcgtgcggaagaatactcaaagcaaacttcatatttgataacgtatattcatgagcacaacataccaatgtatcgtcaggtaacgcacttaacttattaagtgattgatacatttgtgatgctgtcccttcaaacaacctaccacacccaccagaaaacagcgtgtcgccgcaaaatagataaggtttactgaagtaacagatatgtcctaaagtgtgacccggtgtggcaattacactaaattcatgccccaaaacgaaggcagtttcgccatctttgactacctgtgttgttcccttatcttgtgtctcttgtggaccatacaccacaatttgcggaaacttttccaccagttcttttacgccgccaacgtgatcgtgatgatggtgggtgagaaatatggcctccggttgccagttattggcggcaatggcgtttaatactggctctgcgtctccgggatcgacaatcaggcagcgacctgcttcatcattcaaaacccagatgtaattgtcatcaaaggcgggaatactgttaagattcatagattacctcttagtgtgaaacggaaggttgtgatgaaaccggcaagagtccctcaaactgtcgtggctcctgatcgctggggcgatttgccctggggagagctttatcgcaaggcgctggagcgccagctcaacccgtggttcactaaaatgtatggttttcatctgcttaagattggcaatttaagcgcagaaatcaattgcgaagcgtgcgcggtttctcatcaagtgaatgtttctgcgcaaggaatgcccgtccaggtgcaggcggatccacttcatcttccttttgccgataaatccgttgatgtttgtctactggcacatacattgccgtggtgcaccgatccgcatcgtttattgcgtgaaaccgatcgggtattgattgatgatggctggctggtgattagtggcttcaatcccattagtttaatgggattacgcaaacttgtgccggtattgcgaaaaacctcgccctataacagccggatgtttactctgatgcggcaactggactggctctctttgttgaattttgaagtgctgcacgccagccgtttccacgttctcccgtggaacaaacacggaggaaaactattgaatgcgcatattcctgcgcttggttgcttacaacttattgttgcccggaaacggactattcctttaacgctaaacccgatgaaacagagtaaaaacaagccacgaattcgccaggcggttggagccacccggcaatgtcgtaaaccacaagcttaaacttcgacttggtagcccgtatcttccagtgtgggattcattgccgcagcacgagccagttcatcacagcgttcgttttccgggtgtccggcatggcctttaacccattcccatttgatttgatgttgccctagggcagcatcaagacgttgccagagatcgacattttttactggttttttgtctgcggttttccagccacgttttttccagttatggatccactgggtgataccctggcggacatactggctgtcggtactcaaaatgacttcgcaatgttcttttaacgcctccagcgcgacaatagcggccatcaactccatacggttgttggtggtgcgggtgtagcctgcgctaaaggttttctcgcgtccgcgatagcgtaaaatagcgccgtaacccccaggtcctggattgcccagacacgaaccatcggtgaaaatttctacctgtttaagcatctctggtagacttcctgtaattgaatcgaactgtaaaacgataagtctgacataaatgaccgctatgagcactgcaattacacgccagatcgttctcgataccgaaaccaccggtatgaaccagattggtgcgcactatgaaggccacaagatcattgagattggtgccgttgaagtggtgaaccgtcgcctgacgggcaataacttccatgtttatctcaaacccgatcggctggtggatccggaagcctttggcgtacatggtattgccgatgaatttttgctcgataagcccacgtttgccgaagtagccgatgagttcatggactatatccgcggcgcggagttggtgatccataacgcagcgttcgatatcggctttatggactacgagttttcgttgcttaagcgcgatattccgaagaccaataccttctgtaaggtcaccgatagccttgcggtggcgaggaaaatgtttcctggtaagcgcaacagcctcgatgcgttatgtgcccgctacgaaatagataacagtaaacgaacgctacacggggcattactcgatgcacagatccttgcggaagtttatctggcgatgaccggtggtcaaacgtcgatggcttttgcgatggaaggagagacacagcagcaacaaggtgaagcaacaattcagcgcattgtacgtcaggcaagtaagttacgcgttgtttttgcgacagatgaagagcttgcagctcatgaagcccgtcttgatctggtggagaagaagggcggaagctgcctctggcgggcataaatacctgtaaaaggcgctaaaaatagcggcttgggcgatttttgcagcaaacgattcaaaagatgagaaaaaccgttgacgaagggtgaggcaatccgtaatattcgcctcgttcccaacggaacacaacgcggagcggtagttcagtcggttagaatacctgcctgtcacgcaggggggcgcgggttcgagtcccgtccgttccgccaaattcactcatgaaaatgagttcagagaaccgcaagatttttaattttgcggtttttttgcatttaaatcccgctatttcttcggtctatggttttgttatgctgtaaatgtgttaatcacatatggtagaccatatcattaatatttaatcatactatcgaatcattcaatttaaatatatttgaatgttatgattttcatttttctattgatttaatgaatttatatatactgttatttttgtttgttctgattcaagtggagtatataattaaaaatcgttagctaaacattaccatgattatgacaggcgagggagtgtccgattatgaatttaagaagggtttgttgtatatgtgtattattctcgctgcttgcaggatgtgcctctgaatcttctattgatgaaaagaagaaaaaagctcaagtcacacaaagtaatattaataaaaacactccccagcaactgacagacaaagatttattcggtaatgaaaccactctggccgtatccgaagaggatattcaagctgcgcttgatggagatgagttccgcgttccccttaattctcctgtaatacttgttcaatccggcaaccgcgcaccggaaaccattatgcaggaggagatgcgaaaatattatactgtttccacattctctggtatcccggacaggcaaaagcctctgacttgtaacaaaaacaaagataaaaatgagaacgaggatgttgccagtgctgagaatatgaactggatgcaggcactgcgttttgtggctgcaaaagggcatcagaaagcgattattgttttccaggatacgttgcagacaggaaaatatgactctggattgaaatcaatagtttggtcagattataaaaatcaaaaattgactgacacgatgtcactgcgctatctggtacgattcacgctggtggatgtagctacaggtgagtgggctgcctggtcgccggtgaattatgaatataaagtgcttccaccattgcccgacaagaatgaagccagtacgactgatatgacagagcagcaaatcatgcaacttaagcaaaagacctataaagcgatggtaaaagatttggttaaccgctatcaataataaattatatctgccgccaggaatttctggcggaaataatacaaaattctttgcataagaaatttttcttgacaaagacagtgcaagaaaggacatggaatccggagttaaaaactgtttgttttagaatgtttaattatttaactgctgaatcttccttgcgagaaatatattcattattacatttcatgccatttttaatatagattgctcctgggaaaattcccgtattattaccgcaggggtgataattagcattgacatatcctgtgacaaaaggagctattaaaggtgctattacgatagctattagtaaaaatataagagttagctgtattgttatgtctgtggcgaaattgactaccttcgtttttttgattaagaataattttattatcgtaagtaaaattacatgaatatttaaaaaggaaaacgacatgaaaccaaagcacagaatcaacattctccaatcataaaatatttccgtggagcattttattattgaatatagaggtttaactccggtaaaaaacaaagaagcattgaatgcagggaaaaataatatggccataaaaaacatcgaaagaaactcttttaatttaacatgtaaacgcatggttaatcctcatatcacgggtggagtgttaagaacatacataaatggagtcatgttttcccttttccatttatcaagttcctgttgccgttttagtccatctctaattgcatattttaatttttctgataaatggcattgagcatcgatttcatttaaaacaactgtacacactatccctgtcagtaaaattgctcctccgacaagaattactggaaagccaaagctaacacaggcaaaagaagccaggcttccaatagcggttgcaacaccaccggctataactgctttggccacatccattgaaaaatcgccaagaaaattaaccagatctcgctctgaactcataataaattctatggttctccaggctactgaaaaccagatacagaacttaactccttttattgattcagataaagctcctcgccagccaatagcgagttccagaacttgaggcgctcgtgaagagaaaatatatttaccgagcttttctaaaagccaggggctggatgttgtgatttttatatatttctctccaagtatttcaaagtaacttgcttttgtatactttaaggcattaatgttaaatataattttcccattgtcatcaaactcagtcattaatttactcgcgttaactaaccaggcgagtgtatcttttatacctgaaggatgtgtagtgataaaatgaatgtaatcaaatgatgttattgggctgagtatttttttttttttttttttttttttttttttttgcaacatcaagtgtcaagagaataacatgatgagtgttctgatgccttaactcatcaatgagtgggacgtcgttaagataagggtgctgaggtactagctggtttatcggctgagccccccgaagaatgtcacccacataatcagcccactgtgcattctgtgtgttgttgttattccttaaaccagccattttatctctccgcaatagtaatttattatgttattacagtaagttactgtacacgatcctgccatttactcattgcattcgtaccggctaacgtatgctcccaggaaatatcttcataaataaaggcaattctctcctgtggttccagttctttttccaggacagcatgcggtgtgacaaaatcaatacttgatattcgggcttttgacagatttattttataataaggctggtaaatacccgctttactggttcggtagagtataaattcacatattgccattttttcattgtcactaagtgcttttgccagcaatggtgaggatttatcaaccggtttggtgataattaattcatgatgattgacattttgacttcttgagatggaatgcattaacgcataaaccatgatctgatctttatgttctggctgcgctttgtttccgacagaatcaagcgttgagcaacctgctgaaattagcccttgtgtctctccactcaaagataaataacttatatttgccatgataatctcctttaattaaataattatttttcggccgtggtaccggttgccgcctctggcatgacgttattcttcagcagcagccagcggcttaacacgccttcgagtcgctcattaatttgtttttccagcgcatctgtattctgcttctgcgcacgggcatcatggtactgcgtcaacagagactcaacgggggtttcctgccccagtccccgctccgcctgccagatgacatttttgatataggaaagggttagtccctctttctcgcgctgcatcactagatctgcaaaagcatgtaagtcctggcgggtctgcaaccagccacgcaactgcgggctactctgtgcgcgggttttgagtgcctcattccattgtgtcgaggcctgttgctgttgcaggctttccggccagcgactgtcggcaacacgcatcatctgcatcccggtttccagcggctgtaccggggaggtatcaagaagttgttgcagcctgcgctcatagttttcgagttcaggtgaggccatccacaccgttgctgcgccctgagcggtgtcgttaacctgtaacagttgctgctgcaccggatagacctgccaccaccacaatgctgaggcgacagccactgaacaggcgatccctgcgataaaccctcttaccgtactgccttgctttatcacactggcctgtgggggattctctgtcagactgcgcacttccactttcatctcaggcaggccgggcaggggaggcactaccgcttctggtgtggaagatgccagtgtttccggggcataaatcagcgttctgaccgtggtctgtgcggcgttctcagcgttactcttcggctggggttcaagccgtttacgcgtgtgctgcataaaatagagcagattctccacgcgcggaacgcgcttcagttccacctgctggagcttatcgcagataagctgcaatgcccgctctgtgcggtagatcagtggtaggtcggattccgcaaaggagatttgctgacgcagaatattgccggttcgggagttaaaccagtccagcatttcagtacgcgccgggccgccctgcggccagaacttatcccagtcgtggcttaccattgccgccagcagttccgcaccttcgcagaatcccgccagtccctgtgtccgtgtccgggcaagcgtatagtaggtggcggtgtgtaaatccacaccgttggctttaaaaatcgccagcgccagcgactccaccagtttccagttcagctcaggctgtgacgggtggctggctttgtttatttcctcgcggatggcgctgaattccggcagcccgcgcgggtcactgccggtaacgatagtttgtgtcagtacgttactattcatccctgcctcctcagtacagtgtgtctgacagaccaaactggctgaacaacccaccgctgaacgggttatcttccgtgtcggtatgcacacggtaggtcatcgcgccaccgtccacgctaaagcgcacggtaaagttgccatcctgtactccggtcagttgtccggcccagaacaggcggaactgcgcccacggcccgctgaagctgatactgcgcggcgcgttgccgctggtgccgatgagcgtcagcttactttcgttgccttcgcgcatgttgttaggccagaccagatgggcggtatagttacggccctggctgtaatcgactaactgactgtcaaggttcagtacactgcggcgtttattgcctgaaagcgataccgtttccacggcaaaggatgttcccagaccgttctgtttgctgaagaagatgtcacggattttctgcgcagtttccagttgcgcaataatatcttcgcgaataatgacgttgttatcgccatcctccagactcaggtcattatcgataaacagcttcaggttctgctggtagaaggtatccagtatgccatccggtttaaagaagcgttcgaaggcatccagtgaggcatcctgtgcagaacgcggattaaacggatagttatttgccagttgctcgttaaacggtttcaccacgctgtcgcgccagtccacttccatataatgaacagcctccaccatcaccacatgccaggcctagtcagtcagtctgccaacccagcggttgagcggagcaggcagcgtttttgccatctggcgggtggcgaatatcggatcgctgctgttctgatcaagccgtaactgcacggctttcagcgccgatttccctggtacaggcgcgttctggattgccagcaggtagcggtgcaactcggtgagttgctgatacacggcctgcatcgtgctttctttgtctttctgtactgccagggtactgttttccggggcgaattcatgcccgaggcgggtgagtaactggtaatccggctctgccagggcttcctcccgttctttggcagagagtttttcagaaaagacgcctggctgtgtgctgtcacgcagcacggtcagcgcccgctgcaaaggctggtcgccgctgataacctgctccagcgccccggtcagttgtccgatggactcaaaattgcggatattcagattgtccatcccagcccgccaggtggcggtgtagtcgctgatatactgctcggtcaactggtgctggatttccgcacggtcggcgtcactgtatttcacattgcgggtgaggttaagtacccaggaatccatcgctgtcagttcaaccagttcatcgcgctgttttacaaaatagctttgcaggccgtagcgggtgataaactgtggaacaaccagtttgttgtcatcggcagatgtaaacacctggtcaaaggttggccctacctggtcacgcagattgaggtcggcaggaagaacgcccagcgcccgcgttttcaggctctggtaaacccgctggtagacaggcagtttgctcagttctttctgtgctgataccacgggcttgtcatatggcgtccagcggctgatggcgtcaccgtcgcccgcctgacgctctgcgtgccagtcagtatgagccagcgcgtagtcaagatgggacatcagttgtgcctggatatcgcgctgaccgtggaacttttcgctccagcgttttgccatatactgcttcaccacctgattgttacgtccgcttttgtcctccagcattcgcatcacgcgcagcaccgcgagtttttcttcactctccggcggcgcggcgttcatcgctttgaccagcccgttaaacagcgagggcaggtaacgttgctccagcagttgcagataggtctgttccacataaggcccgatacgtcgtccctggtacagtcccatatcggccagacggctgcggtcgccccagtcgccataggccagtgtggcatcgcgtaccgggttcaggagcggcagttgcaggttgccaaagtcatcttccccctgcggaggcggcacgtccataaaggctttggcctgcttaagcacggtgatgccggactgatagttaccgttgtaatagtgatgccagccggtgatgagcagcagtgctgccacgccgcctgtggcagagaaaaccgtcaggcggcgacgggaacgtatcagccaggcgcggctctctgttgccagattaggctctgcgagtaatgcctgcgggaacaggctgcgggtgaaataaggcgcggtgtccaccaggggccaggacgccagtgggttattgcccagccggtactggcgggcggcagactgggtgaatatatcatccatctgtccacgctgaagcgaagaggtgagatagacaccacgcagcatcacgttcatattttcgccatcaagcagaccctcaagcagtgacaccagcggttcacggcttccctgcatctggcgggaaaaactgaataaagacgcgcgggtgtgagtctgagcgaccatcagatccggcaacgccagattcattcgatccacccatgtctgccagaaagcattcaactctgttcgccagtcatcattttcatgggcacggcgggtgaacgtgacgcccagaatcgcatcgcgatcctgtctgttgagtgactggaacagggcggcaaaaccctgtaataaatcaagccgggtcagtaccacgtaaaccggtaactggcagtgaagatgctggcgtatatcctgtaagcggctgcgcagcgtctgtaacagatgctcgcggcggcgtttgtctgcggtcagcagatcgggtaaatcgagtgtcagaataatcccgttcagcggctggcgcgcgcgcttttctttcagccagccgagggcatgttcccacagacggcgatgcaggatatccgcatcagcgggagcgcagagtgtgccgtcgatatcaaagatcaccgcctgtttaccgacatggggcgtgaggtacaggcgttgttctgcgccgcgtgcgccctccggggcataaataatgtcggacggaaaccccttgcgcagcagtgtcgttttgccactgcccgccgggccgatgaccatataccacggcaactgccacaggaaacggcggttgtcgagatggcgttgcaggcgcagcagccagcggtcaagataacgctgctgggcgttcagttccacgctgagcggatcaacggcttcctcgcgctgttgcttttgcattttttcaagctgttgcaggcgcttcatcacccggacggtaagccacaccagggcaataatcccccacgccgccgttgccagccagcggttcgccagtggtttgagccactgttcttcatacagcgtccacatcgggcctttccaccagatccacaccagcagaaaaatccacgccagtatcagcagccagaaagcagagactttaaaccggggcatcgccggtcgcagggctgatttgagtccgctgagtagtcggggtgttggtaatctgaacacaaaaactcctgttctcttttattgttctgccgtgaatttttgttctagctgctcaagcagggacggctcccagtctgccaccatcatctgcaatcccatcctgaacaacatccggtactgctgctgcgcaagctgtaccagccccgcctcttccgtcaactgtgcggcaaggtactggcggtgaaactgatcgcggggatcgccttcgggtagcatgtccagatatcgcagcgccgcctccagaccctgctcagcaaaacaggctctggctgccttcgattcctcaccgatttgcgcaaccggtgcaactttggcgtcgggcgaagctgccagccattgtttcgtctgctcactgataaacggtgtgtggtcattaaacagcagcccggtaagctggggcagacgctcaaggaagcggatgacctcatcgcggatggcgtctgccacctgtttgtaacccagacgcagcgccgtctgtgcagaaaggcagtgaccatccagccagtaaggagccagcagtacgcttttctccacctgctgccacagcgccatatcggcactaccgagctgagcatggtaatctgccaccatatcggcggagaccgcagccagtggagtacggccatcgctttccgcctggggcgtactggtgatgttctgccaaagcgcatggcggcgcagacggtagccctgcggtgaatccggctggcgttcacataaaatggccgccacttttaacagcgtgtcgcgccaggctttgtcgtcgtgactgtcgatgacgatttggggagccggagcactgggttgcgtcacgccgctttcagacgtggcggtggtctgtggtgaactaccggaggccgccggagtggggacaggagccggtgccgcacgattaaacgcacgctggtacagggcaaaaagatcatcagtagcctgtgccagttccggggcgttatgtgactgccagcattgcgccagttttgccagttgccctgacagcgcatcgcgctgcgctgtggcggcgttctgtgaaaaaacttcaatacctgtttcaaagcgtttaatgacctggctggcaaagcgttttttatgcgccatattctgcggcgcagccaccgcccagtaatgctccacatacagcgccagcaggcgcaatgcgagatgaggatcaccggcgtgttgcagggttcttagcagatgcgccagcagacgaaaatccttactctccgaagccagaatgaccagcccccggcgctggagttccgggatatccagttgactgtgggccagcgatcccagcttgacgatttcgccgtcgatatactcccagttcgggttgtcatctttcagcgccgatgccagtttctcttccggcaggttttccagcaggtgcgatatccagacattcggatcgcgtaagtccattgccatatttttattctcccgcccagtggcaggcatcgcgcaggggagcaatcgcccttgccagcccgtcaatgttaaaggtcagctttccggcggcattgtctgcgccggtatccaccgtcagcgtttttgcgccgaacagttgcttaatttcatcaatcccggataacccccggctggactccagcagggtgccgttctcgcgcacaaaccagtggctgcgcaatgcccggttgtcggcattcagagtgacggcgatatcatggacatccagagggtgcatcagcgccacctgcatccgggtgatattgtccacgcaactgaacatcagcaccgggcgtggcggaacatgaccgatagccggggtggttatcaccaccgtcgggcgctcccccggcacctgcgtcaccagcagttctgtggtgttgccctcgcggcgtttttcctgctctgtggcgcgggtccaggcctcgcccacaaaaccggctttgaccagcgccccgtcaaaccctgacggggacagcggtgccagcaggcggtcatagcagtcaagccgctccagcgccgcggactcccgccgacaggactgcatggcctgtaacgtggctgtcgcatccggcggggtcgtggtggcgacggcgaccgccacaccggccattgacgatgcttctgcgggcgcggcagtggcgggtaagcccgtcatcaggcccgcgataaaccatcctgtctgccggaaaacgcgcaacctgctcataaaaccgtttcatcctttgtgacggactcgtcgttctgagcatcttccacgtctgccgtaaatgcgccgtccactgccgacaaccgaatccgggcaatcgccgtgttagccgccattttctgcaacagcagcagcgagagcggcggtagcatgtcgccatcgatgaccgattccagcatcctcgcgccgttttccgcgcgggtgacgcggctcatgatttcgtccgtcacttccggttcaatgaccacttctacaccaaagcgactgcgcagcacgttatccagacgggccagttttccggcgataatggtggcgagcgtctctttcgacagcggcagatacggcaccacttccatacgcgccagcagggcaggtttgaagaagtcggccagcaccggatacagtacttcctgcatggtttccgggtcatcggcatgctcgactattacctggtagccgaggttggacgtcaggaagaagacgatatttttgcagtcaatcaggcggccttcaccgtctgccatttcgcccttatcgaacgcctggtagaacaggttgagcacatccgggtgcgctttttccacttcatcgagcagtactaccgagtagggtttctggcgaatcgcttcggtcagtacgccgccttcaccgtagccaacgtagcccggaggcgaaccaatcagccgcgagacggtgtgtttctcctggaattcggacatattgatggtggtcaggtactggcgaccgccgtagagcagctctgccagttgcaggacggtttcggttttacccacaccgctggggccagccagcaggaacgcaccgagcgggcgtcccggacgacgcaggtcggcgcgtgcggtcagtagatgcttatgcaggctggcaatcgccaggtcctggcctttgatggtgtcacccagccatttcgtcaggtcggtgatgaccgacatttcattctgcgacaggcggttgagcggcacgccggtccattcggcaatcaccgccgcaatctgttttttatcgacgtgcggggagaccagcaaccggtcgttatgcagggcgtccagttcggcagtgagctgggccagccgctgtaccggggaaactgtttcagcggtctcttccggttgttctctgtcggcctcatcagccggttcggcaccggtattatcctgctctgactctgactctgactctgactctgactctgactctggctgcgtatcctccacggtatctgcgtccggcaacggcgccgcatcgtcctctgccacgcccagtaactgctggcgcagcgcgataatctcccggaccagcgtctgctgctggtgccaggccgcttccagttcatccagcgccgtcagcgtttcatcatactgcaccagcacctcggtcatccgtgatgtgtcggtacgcagtccgatgcgaagctcgcgctcaagctggcgaatttccgcctcctgctggtggctcagagtggtcagcgccgagatttgcttcggcggcgacgacaggttgatggccacacgggcgcaggcggtatccagcacatcaatcgctttgtccggtaactgacgcccggagagataacgctcgcttaatgtcgcagcggcctgcaaggcgtcatcatcaatcagcacgccgtgagactgttcatagaccgccgacagaccgcgcagaataatggtggcttcggcagcgttgggttcgctgaccttcaccaactggaagcggcgcgacagggcggcatctttttcgaagtattttttgtactcgctccaggtggtggcggcgatggttttcagctcgccgcgcgccagcgccggtttgagcaggttggagatatccagcccgccctgctggttgcccgcgccaatcagggtatgtgcttcgtcgataaacagaatgaccggcaccggggaggaaatgacctccgccatcagccctttgaaacgtttttcgaattcacccttcaccgacgccccggcctgcaatgcgcccaagtcaagggtcatgatatcggtgtttttcagcttgtccggcacctggcctgccacgatgcgcagcgccagcccttcaatcagtgcgcttttgcccacgcccgcttcgcccaccaccaccgggttgtttttacggcggcggcagagaatgtcgatcatcaggtcgatttcgtggtcgcggcacagtaccgggtcaagcctgccgttacgggcgtctgcggtcatgtttttggcatagcgggcaagcagggtgtcagaggcgtccgtcattgtgcctgcgcctttaccgtctgcatccggcacgactgattccgccgactcctgtgtccactgcacaaagtcctgttgcagacggtcacggttaatgccggtcaacagccgggcggcagcaggcggtatataacgcagcggcgaatgcagcagggccagcagcaacacgccgccgcgcagttcgctgtgctgcatctcagccgacgccagcagccagccctctttaagccactcaaccagcatcggggaaaacgccgggtagctgtccgcagaacgggcggttgtgtagttctctaccgtcagcgcctggcgcaactcttccatgccaatatcgccctggcgggtaataacccgcaggtcactgcgtggcatggcgagcatctgaatgagcacatggctgacggtaatttccgctgcctgctgactcatacattcagaggcggccatctccagcgcctggcgggagaacaggttcagccgttttaccagcgtgggaagatcaatctggatcataaacgtccttatcgaagtaatttgtttagctggtgcaggatgtcctgcgtctggctgtccagccgcaacagatagaacaggtaaaacaacgccagcacgacaacgccaccacaaaaaatatgtttaacagtcaggcgactgatgagctgataacgcccgccctgggtttttttgtcctggtgtaacagcgggaaaggggcatcgccgcgcagtttatgcagaacgtggtacagacggcggtagatctgctcaaattccccctgatcctgtgctgccactttgtagcgcccgcgaaatcccagagaaaaacagatccagagaaattccagcagatcctggtaacgtttgggttcacggatcaggcgctccagcaggatgaaaactttctcgccaccccaggcttcgttgtggaaatggaccagcaatgactgcttgatccactcgttcttgtttgaccagccgttaccgagcgccgcttcatcaataaacgtgcagaggatgtagcgaaacgagataatcacgcccggttcgtagccctgctcctgaagcagttgctccacggcctgaacatctgtcaccacctgagcaaaaagatgctccggcatcgtctggctgttcatggttgaaaggcgcattaccataccgagtagcggcgtggccgcgtcgatcatcggattcaggctgttgccacgaagcgcgagatggtagttgcgctggcttttttcgtcgtgtccggtaaatggtggcagagacagtgacccctcatccatcgtcttaccctcttatcgcccacagttgcatgttcagatccgggaaactgccggaaacatgcagtgcaacggccccggcggcagccatttctgtccaggcctggccactcttgtcgagttcgaaatagctgaacccggaatggtaaggaagctggcggggagccaccataagggcacgcaatggaatacaggggatctgcacactgaccatattgcggattttttccggcgaggaaattttcgactgctggataaactggcgctggatctgatcgaccggcatatttgccgccacggccagcacaaaggtggcagattgcagcagttctgtgtcatggatatcggcctgccagataccgtcacgcagatgcagcggcagattgacggctcttggcgacagtacggtatgcagcgcccgtttgacttccggtaacagcgttttaaatattttggtcaggtcatgatgatcatacacatcaagcgggcagggcaggcgcgacggctcggtaaaggtcatcagttcacccagcaacccggcaagatcaaggtagaaatcttccgggtggagctgggatcgacgggcgtgatgggtaaaccgggtctggttacggttaagtaactgcaacatcataaattccgccacatccgcgatgccgctctgcgccggagagccaatacggtttgccagatcgcttgcccgtccgccaatggccccctgtacctctttgagataaacacgcagtttcttactgacctgaatattctggcaggaggggataaaatcgtcatccaacgtcagggagccatcggcatggcgatcgctgatacggcaaagcgggagcgtaatataggcgctcatatcttctgcaccgctcataatgcgcggcgtcagttgacccagcgtcaatgttcgcgcgtcaccttcttctgaatgcaaatcccggacatcggcataattcagccggtaacgcccgattcgccgtccgtcgctgatttcatttctcacatcactggcgaccggcagagcgaggtagatattgcggcttctttcgtccggaaaattttgcgggtgcagcggatcgggcagtgcgtcctggtcggggatagaaaagacggtgccgtcgggcagtgtgcctgacgcgctgtcaatcatgatcttaccctgcgccagcagttcattgttgagggtgagttcggtaaatccccaggataaatcattcatggcccggaaacgctggttatccaggtagtcgttgtaacgctgctgctgctggaaatggtgtggacgcatcagcatcccttcctgccacatcaccttgttgcgggtggttgccataattattcatcctcttttttcatttcgatgctgctttgacgtacatgcaccagcaggcggtaatggtggccgattccttccaccgtctcgatttgtttccattcagtggcctggtcatcggagaaataggccacgacaccaataaactgcgttttctcatccagctttaccggcggcagggttttgatggtgtccggcaacaggttgaaatcctggtggtcgatatagtttttacccagcacatccggtagcggcgtgctggctatctggtcatagtcggctgccagcaattttgagtcgtcagtcaggtacaccagttgcacatccacggcggctgattcaccttccgcattggtattggtgtccggttcggtcagcagggtgacggttatttccgaaggttgctccttcaggctcccgacctggatatccgggtttttgatcacctcactgatttttttcgccgtttcgcagccggttaatatgacgcacatcagcacgcaggccagaaacgccttcctgttcatgcttccggctcccgctgtttttcacgaagcacccggtcatagacctgggcgtagacctcgttaaacagcatctcaaacccctgctggcgatcggaggccagttcttcgtaataatggctgtacatttgccatgctccggcatcatccagcggctggcgcagttcatggctgcggcggtactgcacaaagcggcgcagcagattttgtggtgagaaagcatccagcaggacacgaagcgactccacaatcgctgcccggttagcttcttcgtggtggcggacattgcgcaggctttcactgacggcggcgggagccgccagatgtaccgggcttttaccttcggcaaacattacgtcgagcgcggtggcgtaatccatgttcaggcgcagcgggttatcttccagcgggcgcaaatgtttgtctgagaggctgttacgctgctgctgcaaatcgagcagaccttttattgcggcctgtaacgttcgtccggcctcctccagaaaatcatccgcatcgtcggaattgctcatggtaagcgagccgccaagaccgcgcagtaagggggtgaccgcaacgtggcgttgcgccatttctgccgcagagacgtcgtcattacgatcgccggggctggcataaatgggcggcagatccataaacggagtattgatccccccattacttgccggatcggacagcggtgccgatggccggacagccgcaatgcctgaaagcggatcgcccgtggtaatcaggctttcggactgaagagcctggagtggatcggcagaaaaaccgtttaccacggtgtctgcaagctggtgccggtgagtcattcccggatagtgtggcgcaccctccgttgatagcagggtatccgtgagcatatcgcgattggtaacgatggtttcgggagtggccatttcctcatcgtaatggggaatatctccccggttcagatgaaccctcaccatcagccgtccgatctggatctcatcgccctggcgcaactgtattaggtctgatgttgctgtgacttttgcctgattcagccacagttgtgccgtctgcgggcgcagacaaaatgtgccatcgtgcaggataacggtaaaagcctgggccggaatgctctgctgacgatcctgtaccgaccagtggcattcggggccatggccgacatttccctgctgtgtgaacagacagcgcgccgcccgcccgctttccagctcactgccgttaatgacctgcaatgaaagcgtctgtagtttctcttccggcatattctgctccgtgattatcataatttacgaccgtaccctgatggtgactgagggtcgttcttccggtgtgccgaggaagctggtccagcccagcagcgcacttttgttatcgcccaggcgcattgcgcccacctgctccggcgccagccccagatgtaagtcccaggcaagctgatcgcgcaggatgaaggacacgaacatcgtcagtggcaggaagttttcgccggacggcagaaaagagaggaactgttttcgggtcaggctggtaatactgagctggaattttccgctgagatcgggcactcgtgtacccagaacaaagttgcccagtaccgatcttcccgccagtttttcgccatttttaagagaatagctccccagactattttgctgatccggttcaatatccaccttgcgacgttgccagttttgcagtgtcacttctgacaaatcaaagcagtgggacaccaggccacagataatttccggggatcgtcccggatttgccaggatcccggaatacgccagcattttgctgtgattaatcgccagcttatcgcgaagctggcggtggcccagcccgacaagggagtacatgcgctgcgagaacgcatccacaccgccgttacgaaaactgatgtgatagcggtacttacgccagatatgccagacaaactgggtcaggcggtggctgaacatatccagaaaatcacctaccggactttgttcatgtaccgctttccaggccaggtgagcgaggtaataaccggggagaggcgactggctcccctgtaaccccataaaggtggtggtcatcctgaatgcccctgacgtatcccgtttcagcgcactgatatcactgcacgggaaggcaaggctggcatcggcgctgaaacgcagggtttcctgtgccggatcgtcgcgcagggataattctggcgtccccttttcaccctttgccaggcggtgcaacagctccgccatcgcaaaaaaattgtaagagcaggcattatggaaaacctgtgccagcggatcattctgctctttatctgccgggggatttcccggactcagataagaggatgctgcccgattctttccgtccatttccatgtctcctggctttctgtgttcacaacggtcagcatgtggaatgagttaacgctggcgtacagcgacagaaaatgcgaaagcaccgtaccgagcagatacatttccccttcacagacaaacggctccgggtgcagatacagcgtggaagccagcccccggacgggaatacccgtaaacaggcgatcaacggggcgggtctccagacgctcaatggcatccagcttttgttgtgacagccgtgccgtctgcggatgatggattgcgtggcgatcaaagttggcgatgacctgcttcagcgcgtccgtatccagtaatgacagataattcaggttcatggcggagagtaggggccagtgcaggctgccatcaatgaccggccagagtggttgcgtcgggcgggtaatgttgcgaaatgaagcaacagccgcattttttccggttgtgccggtgatatcgccggaacgaatttgtgacggaagctcacggttggtacaggtcagcgataccgaaaccacttcattactgagcagagattcgtctgacggataactgccatcagcatgtataaaggcaagggtatgatcaaagccgcgatggaacagggatgttttggtccggtgatgccagtacaccacttcccgcttccggctgtattctatctgatggctgaaactttcaaaggctggccactggcgcgcggcctgcgtcgaaacaggacgccccagatcttttttcctgaacatatcctggacctggctcaccacactgttaacggaaaatacatcgtaatgttgtgggtaatggcggctgggaaccagcggatagtctgcccgccggttgtccagcgtgatggcttctgcatggtggataaataaattaatggcaggtgcgcaatacaggcgcagggaatcgcggcgcagccggatgtccacgggcaaagggcgcgaaaaacgcagttgcagggtaaagaattccgcctgcaatccgtcaggcaaagccggacaaccacaaagatcaaaaaagagaaacgcatcggggtaacagaaatactcctgaaggatccggtagccgctgtggacgtttttcggccagggcagcatggcatcctgcggctcaaaaccgacagcttttagcataaactcaggcaggcgaatatgctgttcacccacagtcaggtcggcaccctgcaagtattcgcagaaccataaataaagctggtcacgggtatagttgtcgtcattgccgagccagaagcgaagtttgttcagatccagcgtgcggaagtccgttcccggtgcgaccgaaaaggtgatgttgataacaccattacgggtcgtactgcggttttcaatctgctccaggcgaacgggcagcagccagatatcccggcagagggtgaaggtacagggaggcggctcctcctttttagcatcagagggcagcacttcatcaactctgatttccccggcgttggttgtaaactgctcattacgggggattaacaccggtacagaagacttatccatatccggcgtatattcaataagggtcattgccggaaccggacgcaggtaattaggccatagcatcttaataagcccgtgcgtcagttctgggaattcatcctcaattttctggcggagattgccggtaagaaaagccaccccttccagcaggcgttcaatatccggatctgcatctttttcggccaggaagcgggccagatggggtttttccgttgccagcagcttgctaagctggcgcaggtaatcgagttcttcccggaaatagcgttcttcaaattccatttgtcagtccacccggtaatgctggctgccattcggtgccatatcaaattcaagcacctcatgcgtttcgttaaatgtcacccaggctgtaatatgaaacgtcatatccagcgggctggaggcggatgaaaccactgcctgcacttcagcgtgtgagatccggggttcatagcgttctatacattgctcgatggcccgactcatggattcgcggaagttttcagccccttccggttcatcaatgcccagctcaggcgcaccccggcaactaccggaccgggtattaagaatgtttcgtaggttctggcgaatggattgcctgagcgaatgaatactgcctccctgccggtttctggccgaagaggcttccatacgctcaaaaagagaacctgtggttctttcccgatccggtatcatggtgtgttactccctgtctaaccggccaaccagggaaagctcaaaatttgcccccataaatttaaaatgaggtctcacgcttagcgcaacctggtaccagccgggttcgccttctacatccataacctcaactttggcagcgcgcagaggtttgcggctgcgcacgtctgcaggcgggttttcctggtcggcaacatactgacggatccaggtattaagctctctttctaagtcgctcctttctttccatgaccccagttgttcacgctgcaacaccttgatgtagtgcgctaaccgattgatgatgaagagataaggaagctgcgtacccagcttatagttggtttctgcatcttttcccggaaagtgcttcggtttttgtaccgagtttgcagagaaaaaggctgcattatcagagtctttacgcatggtaagggtgataaaaccctcttcagccagttcaaattcgcggcgatcggtgaccagcacctcggttgggattttggcctgaatctgccccatcgtttcgaacagatgcatcggcagatctttcactgcgccgccgctttgcggaccgataatgtttggacatcagcggtatttggcaaaactgtctgcgatattgcatgccagcatccaggccgtattaccccacagataatcttcgtggttctggctgacatcttcgtaatagttaaagttcttaacagggttatctgttggtgaatagggctggcgaagcaggaagcggggtgccgtaagccctaaatagcgcgaatcttccgagtcacgcagggcgcgccatttggtgtaggccggaccttcaaagatggcataaagatctttgatattaggcagttcggtccacgagttcagccccataaactccggggaaacggaggacaggaacggtgcgtgcgccattgcgcccacggcactgacgtattgcagcagtttcatgtcaggcgcggtatttttgaactcataagcgcccagcacggcagcgatgggtttaccgccaaactgtccgaaaccggacgaataaacgtgcttataaaatccggactgaataatttctggcgcaaactcaaagtcttccagaagttcctgcttggtgacatgaagcacgttgaccttgatgttttcacggaaatcaacgcgatccaccatggttttcagtgagcgccagaacgactcgacctgctgaaaggcaggcgcatggatgatgacatccatctggcggctgatgcgttcatcaatatctgcaatcatgctgtccacggccagtttattgaccggttcggcagatgcagtggattgcaggatgctggcaataaaggctgtcacaccctggagggcaacgtcataaccttccgaaccgggctgaatacgggtctgtgccatgatttgatcaagcagcgacgatgcctgctcaggctgcccggcatgactggaaacgagttcctcttcctgtaaagacatactgaaaatccttctgttttagctgtgtttctgaaaccggcttttcgccatcagtgaagtacgcgctgccagtgcgacgcgctctgctgaaactcacaaaaatggataatctcatccaatagatcactgatacggcgatccagtgttgtaatcagcgcagccacaccatcctggttgatttcaacggacgggctgaaacatacctggtaaaccacctgcagaatgtctgcaacagagaggtggtatgtcccggagatatttttgtgtgccgtcatgcctggataaccctgtttaatgaaatagtggtggttatttattgctcaccagaccgatttctttgagcaactgctcgcgggactcttcattttccagcaatgcctggagctgggtacggaatgccggaaggttacccatcggccccttcagtgcagtcagtgcttcacgcagttccagcaatttattcacttccggaacctgccgggccacgctatctggtgaaaaatcatccagtgatttgatattcagcgccacattcagttcatcgtctgttgtgcttcccttcagcgtggcggggacagtaaaattgaggccaatggctgcttcagccatcactgcaccgaaattgtgcttgttaacggaaactgcctgacgttcatccagtggggatgtttcctgcgtatttccggtatcgccgacaacgagcatgttaagcggaagttccacttcagccgtctggccatctgtttttgggacatacgatatattaatacgctcgcggggcgcgacgctgccttcaaattttttgctcataaaagtgatccgtcatgttatctcgtacaggccatgaacacggcatatttgtaccgcaaaaaaatatcggcaatgccgccctaatggcggtgaaaataaaatcaccactccttcatcaccccgcattttacgcttcaaaataaataagaaaaggactttttatcgatcgtaaagaggggtattctgcaagcgttaaatagattgtgtgaacctgtgcaattcgcgtcaggtgtattatggcaataatttaaatatagagtttttgtgtaacttatttaagtatataataatttcattaaaaataagctaatctaatgattgcttgtttatatatttgttttgtgattgattaagtgggtatttttaaggaatatctcaaaaattatcaaaatgataattcagaaaggataaatacaatatttattcatgattcagctttggccattttatggaggcaatacggactttgaacagttgggtatggttatccagatatatattattaagttattgctgaataagagatttaatgattttaaaaatagtttttacgacaaccgtaaattctagctcggtttgtatgtaaaaaatactgaaaaatgatgcggttccgtgaagtgagctgcatctgcctgtctgggattaacggcaggtcattgtaagtagtaattaaccacgttaacaaggagtttacaaatgccaacaccgtgttatatctccatcactggtcagacccagggaaatattactgcaggtgcatttaccgctgattctgtcggcaacatctatgtgcaggggcacgaagacgagatgctggtgcaggaattcctgcataacgttactgtcccgaccactcctcagtccggtcagcctgcgggtcagcgtgctcacaagcctttcatttttaccgtggcgctgaacaaagcggttccgctgatgtacaacgcactggcctccggcgaaatgctgccaaccactgaacttcactggtggcgtacctctgtggagggcaaacaggagcattatttcactacccgcctgactgattcgacgattgtcgatatgaaactgcatatgccgcattgccaggacccggcgaaacgcgagttcacccagttgctcgaggtttcactggcctaccgcaaaattgaatgggaacacgtcaaatctggcacctccggtgccgacgactggcgcgcaccactggaagcataagttaagccaacagcatccggctatcaggccggatgctgtttttgtattacgccgtagaaagaaaggttgtcagtaaggggttacgttcacgggagatggcggatgccggaaacttcggcggtagcgtgcctgaacgcaagcgtaacactgtactgtcacagccgctttaacagcgaactgtctgtttttccttaaccccggaggttgctatgtcaaccggattacgtttcacgctggaagtggacggcctgccaccggatgcttttgcggtggtctcctttcatctgaaccagtcactctcttcgctcttttccctcgagctctctctggtcagccagcagtttctctcccttgaatttccgcaggtactggacaaaatggcctacctgacgatatggcagggcgatgacgtacagcgccgggtgaaaggtgtggtgacctggtttgaactgggggagaacgacaaaaaccagatgctgtacagcatgaaggtatgcccaccgctgtggcgcacagggctgcgccagaacttccgtatcttccagaatgaggacatcgaaagcatcctcgcgacgatcctgaaggaaaacggtgtgaccgagtggagtccgctgttcagcgagccgcatccttcccgtgagttttgtgtccagtacggcgaaactgattacgatttcctgtgccggatggcggcggaggaaggcatcttcttttatgaggagcacgcgcaaaaaagtaccgaccagagcctggtcctgtgcgacaccgtgcgttatctgccggagtcctttgagatcccctggaacccgaacacccgtaccgaggtaagtaccttctgcatcagccagttccgctacagcgcacaaatccgtccttcttccgtggtgaccaaagactacacctttaaacgacccggctgggcagggcgttttgatcaggaaggccagtaccaggattaccagcgcacacagtatgaagtgtatgactaccccggacgtttcaagggggctcacgggcagaactttgcccgctggcagatggatggctggcgcaacaacgcagaagtggcgcgcggaacaagccgttctccggagatatggccgggacggcgaattgtgctgacggggcatccgcaggcgaacctgaaccgggaatggcaggtggtggcaagtgaactgcacggcgagcagccgcaggcggtgccgggacgcagtggttcaggaaccacgctgaataaccactttgcggtaataccggcagaccggacatggcggccacagccgttgctgaaaccgctggtggatggcccgcagagcgccgtcgtgacgggaccggcaggcgaggaaatcttctgtgatgaacatggccgcgtgcgggtgaaatttaactgggaccgctataacccgtcaaaccaggacagttcatgctggatccgtgtggcacaggcgtgggcaggcaccggattcggtaaccttgcgataccgcgcgtgggtcaggaggtcattgtggacttcctcaacggcgatccggaccagccgattattatggggcgtacctaccaccaggaaaaccgcacacccggtagcctgccggggacgaagacgcagatgaccattcgttcgaaaacctataagggcagcgggtttaatgaactgaagtttgacgatgcgacagggaaagaacaggtctacatccacgtgcagaagaacatgaacaccgaggtgctgaataaccgcaccacggatgtgataaacaaccatgccgaaaaaataggtaacaaccaggcgatcaccgttaccaataaccagatgcaaaatggcatctgaatcgatcgcagtttggcattcgaatcgatcatgatttggcatccatctccgatcacagtttggcatcacaatcgatcacgatttggcatacttccgatcattgattggaattcgccagtcactccgggaattaactcttttcaccacagtctccattgccgtgtttaaaccagtggagacgtcaatgtccaaaaagagaaaatccaggagcactatggaaacttgttttaagatccttcagctcaagttcgataagaagctgactaaccgttgtatcggactgacgttacacatcagcgcctcaaccgtttttgaggttcttgcccgcttcaaagcctcttctctgtcatggccattacctgcggatatatcccatgacacgctggagaaactcattttcccgcccaaagacacctctgcgtcagagcttgttatgcctgacatgctgtacttcgatacggaaatgagaaaacctggcgtgacgcgccaactgttgtggatggaatacaaggcacaggcgggtgacaaagcgatgggatactcacacttctgccgttgctaccggaagtggaaaaaaacgcgacgcctctccatgcgacaggagcatcgtgctggcgaaaagctctttatcgacttctgtggtcctacggtccctgttattaatccggacaccggagagatacgccgcgtggcaatcttcgtggctgtaatgggggcgtccaactatacctatgttgaagcgtgcgaaggtcaggacatgatgtcatggttaaatgcccacagccgttgcctgaccttcctgggcggcgtatcgaagctgctcatccccgataacctcagaagcgcagtgaaaaaagccgatcgctatgagcctgtcatcaacgacagttatcaggcgctggctgagcactatggcacggttattatcccggcccgcccgcgcaaacctaaagataaaccaaaagcagaaaacggcgtcctcatcgtcgagcgatggcttcttgcccgcatccgtaatgaaaccttccacacgctcagggcgctgaatgcacgccttcgggagttgctgacggacatgaataaccgaccaatgaagggatacggtaatcaaacccgcgcagaacgcttccgcatgctggatgcaccagcactctctccgctgcctctggagccttatgaatacacggaatacaaagccgtgaaggttggccctgactaccacgttgaatatgcccgtcactggtactccgttccacacgaactggtcggtcagcgtctgtcactgaaggtggggcagtcggtggtacagctctggcacaaggggcagtgtgtggcgcaacatccgcgcagcacacatgaatataaacacacaaccaatccgcttcacatgccagaacgccaccggcggcatgggacatggacaccggaacgccttatcgagcagggaaaccgtacaggtccgtccacaggccgggtggttgaatccatgctgaaagccaaaccccatccggagctggcttaccgtgcagtcctgggtctgctggcacttcagaaaaaatacggcccggaacggctggaaaaggcctgttacgttgccctgcactataacgccccggacagacgctttatcgacaatctgctgcgtcatcatcgggataacgttgagcttccgttatcccgccagggcgaacaacatccggcatatgcttcagagcatgaaaacctgcgtggtcctggctactatcactgacagaaggaacaaccgtatgagtgataatctgttaaacaaactgacccaactgaaactcccggcgatggccgggagcctgatacggcaacgggaaacgcctcagacttacgacgaactgtcgttcgaggaaaggctgacactgctggttgatgacgagcttctgagcagagaaaacagtcgtgtggcacggttgagaaaaaatgcctgcctgaaatatcaggcaacaccggaagggctgcgttatccggcctcaagaggtctgcgggctgaacagatgagggaactgctgaacggccactacataatccacaggaaaaacctactgataaccggtccgacaggatgcggtaagagctggatagccaatgcgctgggcgaacaggcatgtcgacagaaatacagcgtccggtactgtagaaccgggcgattactggaacagttggctcagggacgtgttgatggcagttggctgaaatatctgaaacagttgcaaaaaatacaggttctaatcctggacgatctggggctggaacagttaagtaacgcccagtgtaatgaccttctggagatcacagaggatcgttacggacaaagcagcacgatagtggtaagccagttcccggtagataaatggcatggtctgatggagaacccaacaacagcagatgccatcctggacagactggtacataactcacacagagtggtccttcagggagagtccctgaggaaaaatcccccgacagtggaaagcagcgaaaaaacgagttaaaaagcggtagaaaaagttaagttcccggttgatcgaatggatgcgaatcgctgatcgaacttcgatgccaatccgtgatcgaatagagcggaatacgcaaccagatccagaacattggcgttaatcagatacagacggttggtgtcaaccaggtggaaacggtgggcagtaaccagattatcaaagtgggatcaaaccaggttgaaaaggtggggatcattcgtgcgctgacggtgggtgtggcttaccagacgacggtaggcggcattatgaatacctcggtggcgttgttgcagtcctcacaggtagggctgcataaatcactgatggtgggaatgggctacagcgtcaatgtagggaataacgtcaccttctcggtgggcaagacgatgaaggaaaacaccggacaaacagcagtttattctgccggtgagcatcttgaactctgctgtggtaaggcaaggctggtgctgacgaaggacggaagcatatttctcaacggtacgcacattcatctggaaggggagtcggatgtgaacggtgatgcgccagtgattaactggaactgtggtgccacacaacctgtaccggatgcgcctgtgccgaaagatttaccccccggaatgccggatatgcggcaattttgagtcaggtgcaaaaaattaaaacggaactggtgcagtgaccagatgaaccatattaaaagcagaaggaattgattcatgggcggcggaaaaccggcggcgcggcagggcgacatgacccgcaagggactggatattgtgcagggttcagcgggtgtgctgataggtgcgccgacgggagtggcctgttcggtgtgtccgggagggattacctatgctaacccggtgaacccggtgaacccggtgctgggtgcgaaggtgcttccgggcgagacggaccttgcgctgccctgcccgctgccgtttattcttttccgtgcctacagcagctaccggaccagaacacccgcgccggtgggggtgtttggtcccggctggaaagcgcccttcgatatccgcttacagatacgcgatgaaggcctgatactcaacgacagcggcggcaggagcattcactttgagccgctgtttcccggcgagataagctacagccgcagcgagtcactctggctggcgcggggcggagtggcggcgcagcacagttcgcagccgctaagcgcgctctggcaggtgctgccggaagatgttcgcctgagtccgcatgtgtacctggcgacaaacagccttcaggggccgtggtggatactcagctggccggagccgcccgcataccgggtactgacggtcgtggtggatggcttcgggcgctcactgactttccaccgggcggcggagggtgacgtggcgggcgcggtgacgggggtgacggacggcgcgggccgccgttttcacatggcgctgagcacgcaggcgcagcgggcggaagcgtcccgtaaacagcgcgcctcttccttatcttccccggccagtccccgttctgtttcctcttctcaggttttccccgacacgctgcccgccggtacagagtacggtgccgataacggtatccggctggaggcggtatggctgacacacgacccggcatacccggatgaacagccgactgcgccgctggcgcgctacacgtacacggccggtggtgaactgcgggcggtgtatgaccgcagcgggacgcaggttcgcgggtttacttatgatgcggagcacgccgggcggatggtggcgcaccattatgcggggaggccggagagccgctaccggtatgatgataccggtcgggtgacggagcaggtcaacccggaggggctggactaccgctttgagtacggagagagccgggtaatcatcacggacagcctgaaccggcgggaggtgctgtacacggaaggcgagggtggcctgaagcgggtggtgaagaaggagcatgccgacgggagcatcacccgcagcgagtatgatgaggcggggaggctgaaggcgcagacggatgcggcggggcggcggacggagtaccggctgcatatggcgtctggaaagctgacttcagtggtactgccggacggcaggacggtacggtatggttacaacaaccagttgcaactgacgtcagtgacatatccggatggtttacgcagcagccggaaatatgaccgtcagggcaggctggcggaagagacctcgcgcaacggtaacattacgcgctggttttatgattcttcccgcagtggcctgccctgtgcggtggaagacggaaccggggtgaggcggagaataacgcgaaaccggtacggtcagcttcaggcgtttacggactgctcggggtacacgacgcggtatgagtatgaccggtacggtcaacaaatcgccgttcaccgggaagaaggcatcagcacttacagcagttataacccgcgcggtcaactggtcagtcagagggatgcgcaggggcgtgaaacccgttatgagtacagcgccgcaggagacctcaccgctatcgttgccccggacggcagccgcagtgagatacagtatgatgcgtggggaaaggccgtcagcaccacgcagggcggtctgacgcgaagcatggggtatgacgccgccgggcgcatcactgtgctgaccaacgagaacggcagccagtccacgttccggtatgacccggtcgacaggctgacggagcagcgcggctttgacggccggacgcaacgttaccagtatgacctgaccggaaaactcacgcagagtgaagatgaggggcttatcaccctctggcattacgatgcgtcggaccgtatcacccggcgcacggtgaacggtgaaccggcggagcagtggcagtatgacgaccacggctggctgacagaaatcagccacctgagtgaaggccaccgtgtggcggtccactacggctatgacgataaaggccgtctgacgggcgaacggcagacggtggagaccccggagacgggggagatgctgtgggagcatgagacggggcacgcgtacagcgaacaggggctggcgacccgtcaggagccggacggcctgccgccggtggagtggctgacgtatggcagcggttatcttgcggggatgaagctgggcggaacaccgctggtcgagtacacgcgggaccggctgcaccgtgagacggcccgcagcttcggcggggaggcatatgaacttgccaccgcctggaataccagcggccagctccggagcaggcacctgaaccttccgcagcttgaccgtgactacgactggaacgacaacggacagctaatccgcatcagtggcccgcaggagagccgggagtaccgttacagcgacacggggaggctgacgggcgtccacaccacggcagcgaacctggatatcgatatcccgtatgcaacagacccggcaggaaatcggctgccggacccggaactgcacccggacagcaccctcacggcgtggccggataaccgcatcgcggaagatgcgcactatgtctatcgctacgatgaatacggcaggctggcggagaagacggaccgtatcccggaaggggttatccggatgcacgacgagcgcacccaccactatcactacgacagccagcaccgcctggtgttctacacgcggatacagcacggcgaaccacaggtggagagccggtacctctatgacccgctgggccgccggacgggaaaacgggtatggcggcgggagcgtgacctgacggggtggatgtcgctgtcgcgtaaaccggaggtgacatggtacgggtgggacggtgacaggctgacgacgatacagaccggcaccacgcgtatccagacggtataccagccggggagcttcacgccgctcctgagaatcgaaacagagaatggcgaacaggcgaaggcgcggcaccggagcctggcggaggtgttgcaggaggacacgggtgtgacgctaccggcggagctgtcggtgatgctggggaggctggagcgggaactgcgcgcgggagcggtgagtgcggagagtgaggcatggcttgcgcagtgcgggctgacggcggagcagatggccgcgcagctggaggcggaatacatcccggagaggaaacttcatctttaccactgcgaccaccggggactgccgctggcgctcatcagcccggaaggggaaacggcgtggcagggggagtatgacgaatggggaaacctgctgggcgaaaccagcgcgcagcacctccagcagtcactccgtctgccggggcagcagtatgatgaggagtcggggctgtactacaaccgcaaccggtactatgacccgttgcagggaaggtatatcacccaggatccgatagggctgagaggtgaatggaatctgtataaatatccattaaaccctgttcggtttatagattctttgggtttaaaattccatgttaacggtgatccaagtgattttaatcaggctgttgagtatttaaaacaagattcacaaatgaaagaaactatagattttttatcaagctctgaagaaactataaatatagagtatattgaaggaaccaatgttagatttaattcgaataatatgacgatatattggaatagtagagcatctttattttgttcaactgaattaaactcgaaatcacaatcgcctgcattaggtttgggacatgagtttgctcatgcgcagtattgccttcttgataaggaaaatttcatggctcttttaagccgaacagataagaaatatgagaataaagaagaggcaagggttattacaataattgaatcgcgtgcggcgaaaactttaggtgagtgtaccagaggagctcatagtggactgcctttttatcgggtggatggaccgttgcagacgatgaaaataacgggtacgccagaatagtgaggttttttatgatgaaatatttgatggttttattgtctctattttctggttcggtattggggatggggcgagtgaatgaattgtgtggaatagatagcgtgaaaacgatagagataattaatcttccatcgtatgttaccacgttagttccgcttagcaaggaaggtcttaatgaaatatacagatataaagtggtggtgaatgaaattagagatctttatgctggtaagataattgatttattgcaaatgaagtatttcagaaaagaaaaatataacaatataagatgggggggtagtatcatttcgaaaggtaataataaatgtgaaatttattttgatgcttttggtgaatgtggaagtgtgaatggcattaacgtgtgttttgaaaaaaatgaaatgataggttggattaaaaaagaaatccctttgctgtcgcaaaaaataggtgggctttaaatggtagggcaatattcaaagacagtataggtaactatttgtatggccatgtaaggtaaaagaaaaggaataaaccatgagcggaaaaccggcggcgcggcagggcgacatgacccgcagggaaagatcatcagaagttcactttttgtactaaataattcgcattttatgtttaaaaattgagatattccttattacctaaagctgttttttattgcttatacatgatcaaatacttcttacataattaaggagaacaaaatggaacttaaaaaattgatggaacatatttctattatccccgattacagacaagcctggaaagtggaacataaattatcggatattctactgttgactatttgtgccgttatttctggtgcagagggttgggaagatatagaggattttggggaaacacatctcgattttttgaagcaatatggtgattttgaaaatggtattcctgttcacgataccattgccagagttgtatcctgtatcagtcctgcaaaatttcacgagtgctttattaactgaatgcgtgactgccattcttcagatgataaagacgtcattgcaattgatggaaaaacgctccggcactcttatgacaagagtcgccgcaggggagcgattcatgtcattagtgcgttctcaacaatgcacagtctggtcatcggacagatcaagacggatgagaaatctaatgagattacagctatcccagaacttcttaacatgctagatattaaaggaaaaatcatcacaactgatgcgatgggttgccagaaagatattgcagagaagatacaaaaacagggaggtgattatttattcgcggtaaaaggaaaccaggggcggctaaataaagcctttgaggaaaaatttccgctgaaagaattaaataatccagagcatgacagttacgcaatgagtgaaaagagtcacggcagagaagaaatccgtcttcatattgtttgcgatgtccctgatgaacttattgatttcacgtttgaatggaaaggactgaagaaattatgcgtggcagtctcctttcggtcaataatagcagaacaaaagaaagagccagaaatgacggtcagatattatatcagttctgctgatttaaccgcagaaaagttcgccacagcaatccgaaaccactggcacgtggagaataagctgcactggcgtctggacgtggtaatgaatgaagacgactgcaaaataagaagaggaaacgccgcagaattattttcagggatacggcacatcgctattaatattttaacgaatgataaggtattcaaggcagggttaagacgtaagatgcgaaaagcagccatggatagaaactatctcgcgtcagtccttgcggggagcgggctttcgtaatctttccctagggagtcagccgaatgttgggaaggatttgacggatgaagagaagaactgcttggccggcggcagtacgggaagcccgggaggatggggaccagaagatgagaatagtgaggtgtactggcaatagcggacactaccatttgttctttttttaagcagccatctgatgatatttttccctgaaggctgccggggagatattccccagacgagagtgacgacgctgacgattgtagaaaatctcaatgtattcccgtattactgagatggcttcatcccggttattaaaacgatagtggctcaggctctcatttttcagcgttccccagaagctttccatcggagcgttgtcgtaacagttacctttacgcgacattgatgttttcagaccaaactgctcctgtatgacccggtaatcgtatgcgcagtactgtgaacctcgatcagagtggtggattagcccggcaggtgggcgctggctcctgagcgccataaacagggctttacctgtcagctcttttgtcatgcgctctcccatggcgtagccgacaatttcgcacgtataaacatctttgatgccagcgaggtacaaccatccctcctgtgtggcaacatacgtcaggtccgccacccagacctgatttggtgctgtaggagcgaacgtctggttcagcagatttggcgcaactggcagattgtggttcgagttcgtagtcgctctgaacttgcgtttctgcttacagcgtagccttagctccttacgaagacgtgccagtcggtcacgaccaacgatgatgccattctctgccagctccgtctggagccgccgggttccatatgtttcgcgagtgcggatatgtgccaccttaatctccagttttagccgctcatcactttgttttctgtctgagggttcatgctgtacccagttgtaataaccgctcctggatacaccaaatacctgacacatcgcttcaatgggaaattgttgtcgccattgttcgattaacgcgtatttttcagcgactcctgtgcaaaatacgctgttgctttttttaatatatctcgctcaaggcgagcttcatttaacgccttacgcagttgcagaatttcagattccagttcagccaccgtgcgggaaccaggagtaccgagcccttttctggcggcggtaacccattgtcctaaagtgccttcaggaagagataatcgggaagcgccttcactgatcgaaagttgattttcaagaaccgttctgacagcttcggctttgaactctttagagtaacgttgggtttttctgctcattattagctccttctgatgccattctatttcaggaaggagtgtccgttaaactcaggctacctcatagcgcaagggatcgtatgcagcatgaacggtataaagatgaattgcgacagaaaatgggaaaacccgacgttacagattcaaatttgaaaaatattatagacgatctttatcggccaaatgcaaaagtaggaagtggaagcacagcagatgctgttcgttatgaattggccacaggtgaaaaagttggtggtagaggacatgtattgaaagcacaggattatacaagggctttacaggattggttggataagaatccaacagcatctccaggggatcgagcagcagcagaaaacgttcttcaggatttacagaatgctttgggaggcaagtaatgaaccaatatattgctagttatatagaaaaaatggcatcattttccactgttttgtctgagacagtctcattagctaatgaatactggcatccagaaacgccaccggtggttatgttgttctctcaggttggaaaaacgattgtaaaaaatttttatgaaatgggggatattgaaagagaaaaaatatttaaacatgtcgaagatggtatggtctcgcttgatgatgaattggccacagttgtagctacagggcttatagaggcaatagtcactgcgaccgatagcaattctttactttggcaagatttaagtaaatttctgggtgacaaatcaaagtctcatgcattagtgtggaaaaattttggtcaggagtgatattattcaagaagtattaagctcgctattgagatcttaatgcttcttgagattaaattaaagttaggacgaagtaattgcaggtggaaataaatccatagtgacgtgtggcaatggctattagatgttatggtgtgatgggctttggtgatttaagagctaagttagattgccttatgaaaaagtatggttatatatttaatgatgtgtatcatatatttaaataaaaaacggttctctcttgtcaagatagtaataggatagactattgtgttgataaatataattaagagtctactttgttgattttagaagactttggagcagggaaagatcatcggaagtacactttttgtactaaataattcgcgctaaatgttcaataattgagatattccttattacctaaaactatttttcatagcttatatatgatcaaatactccttgcataaataaggagaacaaaatggaacttaaaaaactgatggaacatatttctattatccccgattacagacaagcctggaaagtagaacataaattgtcagatattctactgttgactatttgtgccgtcatttctggtgcagagggttgggaagatatagaggattttggtgaaacacatctcgattttttgaagcaatatggtgattttgaaaatggtattcctgttcacgatactattgccagagttgtatcctgtatcagtcctgcaaaatttcacgagtgctttattaactggatgcgtgactgccattcttcagatgataaagacgtcattgcaattgatggaaaaacgctccggcactcttatgacaagagtcgccgcaagggagcgattcatgtcattagtgcgttctcaacaatgcacagtctggttctcgggcagattaagacggatgagaaatccaatgagattacagccattcctgaacttcttaacatgctggatattaaaggaaaaatcatcacaactgatgcgatgggatgccagaaagatattgcagagaagatacaaaaacagggcggtgattatttattcgcggtaaaaggaaaccaggggcggcttaataaagcctttgaggaaaaatttccgctgaaagaattaaataatccagagcatgacagttacgcaatcagtgaaaagagtcacggcagagaagaaatccgtcttcatattgtttgcgatgtccctgatgaacttattgatttcacgtttgaatggaaagggctgaagaaattatgcgtggcagtctcctttcggtccataatagcagaacaaaagaaagagccagaaatgacggtcagatattatatcagttctgctgatttaaccgcagagaagttcgccacagcaatccgaaaccactggcacgtggagaataagctgcactggcgtctggacgtggtaatgaatgaagacgactgcaaaataagaagaggaaatgcagcagaattattttcagggatacggcacatcgctattaatattttgacgaatgataaggtattcaaggcagggttaagacgtaagatgcgaaaagcagctatggacagaaactatctggcgtcagtccttgcggagagcgggctttcgtagtcttaccccgactctcccccagccttaaacacaacccccactcaccgcaacctaaactcatccgcatcctgccatgccggaaacttttctctatattcccgcaatgccatcatcgacagctccgcatcaatgcgcgttgcctgatgcgcgtcggcagtagcgataatctcgccttgtggattaatcacccggctgtcaccgcgataatggcagccgttgccatcgctgccgacgcgattgcatcccgccacatacgcctgattctcaatcgcgcgggccgtcagcaatgcctgccagtgcagagagcgcggagcaggccagttggcaacgtagatggcgaggtcataatcgttgagattgcgcgaccacaccggaaaacgtaagtcgtagcacaccaacggcaaaatacgccagccgcgccattccacaatcactcgcgcattgcccgctttataatgtagatgctcatctgccatgcggaacagatgacgcttatcataaaaatgtaccgtgccgcccggctcaaccagcaaaaagcggttaaccgaaccagactccgtttgtaatgcaacactgcctgcaatcagcgcattgcactgctgcgccttagctgtcatccagtccactacgtcatcttgtgctagcgacgaagctgccgcttccatggcaaagccgctggtaaacatcttcggtagaacgatcacatcgcgcccggtaataccttccagttgacgatcaaaatgacgcaggttggcagggccatccatccacaccagtggttgctgcaaaagcgtaatcttcaaaccaggcacggtgtacaactcctttatgcgaagggttttataactttaacaccttatcaggcagttgccttagcgcagaataaattgataacaaatgctgatattggaaatatctgatttgcaaattatcgtgttatcgccaggctttagaaggttaataacatgggcaggataagctcgggaggaatgatgtttaagacaataacgacagtcgccgctctggtcatcgccaccagtgcaatggcgcaggatgatttaaccattagcagccttgcaaagggcgaaaccaccaaagctgcatttaatcagatggtacaagggcataagctgcctgcctgggtgatgaaaggcggtacttatactcccgcacaaaccgtaacgttgggagatgatacgtatcaggtgatgagcgcgtgcaaaccgcatgactgtggctcgcaacgtatcgctgtgatgtggtccgagaaatctaatcagatgacggggctgttctcgactattgatgagaaaacgtcgcaagagaaactcacctggctgaatgtgaacgatgcgctttcgattgatggtaaaacggtgctgttcgcggcgttgaccggcagcctggaaaaccatccggatggctttaattttaaataattagcggataaagaaacggagcctttcggctccgttattcaattacgcggcttcaactttccgcactttctccggcaactttaccggcttcgtcgccagctcttccggatcaaagtcatcaacgttaatactgcgcagacggctttcttcagctttcaccagaatagcggcttcatctttatcaatcagccccttcgccagcgcgttgtgcgccagttcatccagacgggtaaacggcaggtttttacccagctctttacagatccgctgatgaattgggtcggcggcaatcacatccaccagcgcctcttccagcaagccaaccggattatgctcgctcggcgtcaggtactgaccgcgaccaatgcgggaacgggtggcgttcggcacttgtaaaatcttcgccactttatgatccagcttgtcagaaggtgccagataatgacgtccggtcgggaagatcaccacattcagcagcccggcaaccacgcggttcgggaagttttgcagtaaatcatccatcgcctgttcagcctgatacagcgcatcttgtacgccccagtgcaccagcggcaggtcggcttcattacggccttcgtcgtcataacgcttcagcacggcagaggcgaggtagagctggcttaaaatatcccccagacgggccgagatgcgctcgcgacgtttcaggctgccgtccagcactgccatcgagacatcagaaagcagggcgaggttggcgctcaggcggttcaggtgctgatagtagcgtttagtggcatcgccggttggcgtgctgctggttaaaccgcgcgtcaggcccagccagaagctgcgaactttgttgctaccgacgtgaccgatatgtttgaacaacagtttatcgaacgcgttgacgtcattgttcttcgccgcttccatctcttccagcacgtacggatggcaacgaatcgctccttgtccgaagatcatcatgctgcgggtcagaatgttagccccttcaacggtgatggcaatcggtgcgccctggtaagcacgcgccaggaagttgctttgcccgagcataatgcctttgccaccagtgatatccatcgcatcaataatcgactgctgcccgcggtgggtacagtgatacttaacgatagccgacagcacggcaggtttttcgccgagcataatgccgtaggtaatcagcgatgccgcagcatccatcacgtaggcattaccggcaatacgcgccagcggctcttcaatcccttccatcttaccgatagagattttgaactgacggcgaatgtgagcatacgcgcccgttgccagcgctaccgatttcacgccgccggttgagttggaaggcagggtgatgccgcggcctaccgagaggcactccaccagcatccgccagccttgcccggccattttcggcccaccgatgatgtaatcgatcggtacgaagacatctttaccgcgcgtcggtccgttctggaacggtacgttcagcgggaagtggcgacgaccaatttccacgcccggcgtggtggtcgggatcagcgcacaggtaatacctaaatcttctgcgccacccagcagcttttctgggtcggagagtttaaacgccagcccaagcacagtcgcaatcggtgccagcgtaatatagcgtttgttccaggtcagacgcatccccagcacctgctggccctgccattcgcccatgcagacaatcccggtgtccggaatcgcgcccgcatcggaacccgcttccgggcttgtcagtgcaaagcaagggatctcctgaccacgcgccagacgcggcagatagtgatctttctgctcgtcagtgccgtaatgttgcagcagctcgcccgggcctaatgagttcggcacgccgacggtaatcgccaggatcccgctcacgccggagagtttttgcagcacgcgagactgggcataagctgagaactccagtccgccgtactcttttttgataatcatcgcgaagaagcgatgctctttaaggtacgcccacaactccggcggcagatccgccagctcatgagtaatctggaaatcattcgccatccggcaggcttcttctaccgggccgtcgagaaacgcttgctcttcggcggtcaggcgcggctgcggatagttatgcagctttttccagtccggcttgccctggaacaagtcgccctcccaccaggtggtgcccgcatcaatcgcttctttctcagtgcgcgacatcggcggcatcaccttacggaaaccgcgaaataccggcgcggaaatcatcgacttacgcataggcgcaaagttaaatggcacgaggataatggccagaggcaccagtacccacgctgaccacagaccagcaacgccgagggcggctgtccaggcgagcaaaatcagactgctgataaataagctcacgcggtgatagaacaacgcgccgagcaggacaaccgtagcgagaatactcaaaatcatcataacgaaaagccccttacttgtaggaggtctgaccacttgtgatgatatggttgtagtggatgtaaaaacatttagcaatgtgtttacaatataattacaacaaagctcacattgttgctgtttttatccgcacttcaggtcaaaaagtcctggtcatagcacctgcccgtacttctcgcttttggcggtatccggtacactgcattttgtctattacatttatgctgaaggatatcctcatgtaccaggatcttattcgtaacgaactgaacgaagcggcggaaacgctggctaactttttaaaagatgacgccaatattcacgccattcagcgcgcggcggtcctgttagcagacagctttaaagccggtggcaaagtgctttcctgcggcaacggcggttcccattgcgacgctatgcactttgccgaagagttgaccggtcgctaccgtgaaaaccgtccgggctacccggcgattgctatttctgacgttagtcatatttcctgcgtcggtaatgatttcggtttcaatgatattttctcccgctacgttgaagcggtaggtcgcgaaggcgatgtactgctggggatctccacctccggtaactctgcaaacgtgatcaaagcgatcgcagcggcgcgtgagaaggggatgaaagtgatcaccctgaccggtaaagacggcggtaaaatggctggcacggcggatatcgaaattcgcgttccgcactttggttatgccgaccgcattcaggagattcacattaaagtgatccatatcctgatccagttaattgaaaaagagatggttaagtaagtctggcgtaggccggataaggcgtttacgccgcatccggcacttgtgcgctgatgcctgatgcgacgctgatgcgtcttatcatgcctacaaatctgtacgcgaaccgtaggccgaataagacgtttacgccgcatccggcctgaaaattcttaaatcaatcttcgccgggggccatgcgctcccgctgttgtggaggttacccatgtgcgaattgctcgggatgagcgccaacgtccctaccgatatctgctttagtttcaccggtctggtgcagcgtggtggtggaaccgggccacataaagatggctggggcattaccttttacgaaggtaaaggctgtcgcacatttaaagatccacaacccagctttaattcccccatcgccaaacttgtccaggactacccgataaaatcctgttcggtggtggctcatattcgccaggccaatcggggcgaggtggcgctggaaaatactcacccgtttacccgtgagttatgggggcgtaactggacttatgcccataacggacaactgacgggctacaaatcactggaaaccggcaacttccgcccggtcggtgaaaccgatagcgaaaaagccttctgctggctcctgcataaattaacgcagcgttacccgcgcacaccgggcaacatggcggcagtgtttaaatatatcgcctcactggcggatgaactgcggcagaagggcgttttcaacatgctgctttctgacgggcgctatgtgatggcgtattgctcgactaatttacactggatcacccgccgcgcgccgtttggcgtggcaacgctgctggatcaggatgtggaaatcgacttcagctcgcagaccacaccgaatgatgtggtcacggtgattgcaacacagccgctgacgggcaatgaaacctggcaaaagattatgccaggcgaatggcgcttattttgcctcggggagcgtgtagtttgatgccagttgtggctgcacaacttcgtggcttaacggcttgctgaccacgtaacgaccattgaccacagaaacggtcggtggcttacgggtttgctcaaagtagtcgtaacccggcttcagttgctcccagaagtccttaaagttggaatatttatggcgcttcatattggcgtcggtcatgcggaacgggtaaatactcacttgcacgctcggctgaccaaacaccagcgcaccagtaacgaactggaagatctcatcaataccctgattggtcattgcgtagcagccgatggaaacacaatcgccgtggatcatcaggtatttcccttcataaccatgcgcacggtcataggcattggggaaaccaatattaatcgctttgtagtaacggctgtctggttttaactgattacgctggacgctataaaacccttccgggcttttgaaatcgccctgacgctgttttggccctaagccgccggaatatttacagattttataactgtcgagcagctgatattgctcgcccattttgacgtagagatcgagcgtacgttcttccttgaagatctggatgtagacaggggatcccatcaactgctgcttatactctttgctcactggcgtggtcgagctactgctgcccagcaaaccggcaaacgaaacgcacgggatcaacaacatcgcaagaattaatgcgattttacgcatactgcttattccttgataaaacggttacacacgccaggacggcaaaatagatcccaaatcggaatagtctggatttggaaggctcacattatcaccaaaagagttttacgcaagcctgtcggcgcagggtttacaaatttcatcggcagcgtgctttacccaaagagcgccgcgtgagttccagttctctcaaatcgtaaaagtttatcggtaagtttgtaaatcaggatccagtccggttcgacatgagcatcgcgataacctttccatgaaccttgcagcgggtggtctttataaacagctggaagcggtaaagcattattgataagaagcgtcataagatatttcaatttattcatatccttatgacgcttttgtgcaagttttacatcctttgaaaattgtcccgagtattcaatatccctttgaatcatatttaaattcctaatttatcaaataaatcatcagcgtctttggccttatgaacatcaacgccagcttcgctgtttttgattgattgaatggttaattgattaggctcgcgtaaatcaaacggcaatgccttttcacgcgcgacctttgtgagggttatgcgaaccaggtcagagatggtcagccccatcccggccagtacgtccgccgcctgattcttcagatcttcatcgattcgggcgcgaacaaacgcgttagcagccattgggggatctcctgtgctgtatatttattcagcttgaattgtagctcaaatgagcaacagcgacaatccatgagtaatttaataaacggatgtttttacataataaactgaaatatatttattaattttataataatggtttattaagtttgttcaggtacgggccaggatacactgcaacatcaatgcatgaccagccattattgagaatgtctttgccgtcgattccctcttttgtgttgtcgggattactgttgctttgcttgccgttttcttcatttgcctgcgccaccacatcacatatctctttcagctacgccgcccgccagcggatgcaaaaccgtgcgcgtttattaaaacagtaccaaacccatctgaaaaaacaggccagctacattgtggaaggcaatgcccaaagcagaagggcgctgcgccagcacaaccgggagcagataaaacagcatccagaatggtttcctgcgccgctcaaggcgagtgacagacgctggcaggcgctggcggaaaacaaccactttttaagcagcgatcacctgcataacatcaccgaagtggcgattcaccgtctggagcagcagcttggcaagccttacgtctggggcggcacgcggcccgatcaaggcttcgattgtagtgggttagttttttatgcctacaacaagatcctcgaggcgaagctcccgcgtacggccaatgagatgtatcactaccgtcgggcaaccattgtggcgaataacgacctgcgccggggagatttgctgtttttccatatccacagccgcgagattgccgaccatatgggggtgtatctgggcgacggtcagtttattgagtcaccgcgcaccggggaaaccattcgggtaagtcggttagctgaacctttctggcaggatcattttttgggcgcgcggcggatattgacggaagagacgattttgtaggacggataaggcgtttacgccgcatccggcggtggtgcgcagatgcctgatgcgacgctgacgcgtcttatcatgcctacaaatctgtgcgtttttgcgagccgctttcctgttattccatcacccagggaaagatcatcagaagtacactttttgtactaaataattcgcattttatgtttaaaatttgagatattcctcattacttgaaactgttttttaatgcttatgcatgatcaaatactccttacataattaaggagaacaaaatggggtaatgactccaacttattgatagtgttttatgttcagataatgcccgatgactttgtcatgcagctccaccgattttgagaacgacagcgacttccgtcccagccgtgccaggtgctgcctcagattcaggttatgccgctcaattcgctgcgtatatcgcttgctgattacgtgcagctttcccttcaggcgggattcatacagcggccagccatccgtcatccatatcaccacgtcaaagggtgacagcaggctcataagacgccccagcgtcgccatagtgcgttcaccgaatacgtgcgcaacaaccgtcttccggagactgtcatacgcgtaaaacagccagcgctggcgcgatttagccccgacatagccccactgttcgtccatttccgcgcagacgatgacgtcactgcccggctgtatgcgcgaggttaccgactgcggcctgagttttttaagtgacgtaaaatcgtgttgaggccaacgcccataatgcgtgcagttgcccggcatccaacgccattcatggccatatcaatgattttctggtgcgtaccgggttgagaagcggtgtaagtgaactgcagttgccatgttttacggcagtgagagcagagatagcgctgatgtccggcagtgcttttgccgttacgcaccaccccgtcagtagcagaacaggagggacagctgatagaaacagaagccactggagcacctcaaaaacaccatcatacactaaatcagtaagttggcagcatcaccggcacatcgctattaatattttgacgaatgataaggtattcaaggcagggttaagacgtaagatgcgaaaagcagccatggacagaaactatctggcgtcagtccttgaggggagcgggctttcgtaatcttgccctgttccatcacctcattgccgacctttccttttcttcttaccgttgagaaaaaggagtcgccatgtctgaatatcgtcgttattacatcaaggggggaacctggtttttcacggtgaatttacgcaatcgtcgaagccaactcttgaccacccagtaccagatgctccgtaacgccattattaaagttaagcgagacaggccttttgaaatcaacgcctgggtcgttttgccagagcatatgcattgcatatggacattacctgaaggcgatgatgatttttcctctcgctggcgggaaattaaaaagcaatttacccatgcttgtggattgaaaaatatctggcaaccacgtttttgggagcacgccatccgcaataccaaagattataggcatcatgttgattatatttatataaatccagtaaagcatggttgggtaaagcaagtgagtgattggccattctcaacgttccatcgcgatgtcgcgcgagggttatatcccatcgattgggcgggggacgtaacggatataaatgctggcgagcgtatcattttataattatgcgcagatgcctgatgcgacgctggcgcgtcttatcatgcctacaaacttgtgcctgaacggtaggccggataaggcgtttacgccgcatccggcagttgtgcaccaatgccggatacttacatcaacgcccccataatcttcaactccagctcgtccggcacttcgttatacgacagcacatgcagccccggcgcaaacaaccttgcataacgcgccagcaaagggcgcagctgcggtggcaccagcagcaccgggtctttccccgccgctttcatctgctctttcacctgtggcatcgtgctctggaactggttgagcatattcgggtccactggcacgctgtcgagcatcactttaccgccctgttgcgcctgattcactaggttagtcagcagattttccagctcattattcagggtatacaccgtcagctcctgcttgcgaacgaacggatgggtaatgctgcgccgcagcgccaggcgcacatcggctgccagcagaatatgatctttggtcaccgcgctactggcgaccagcacggtggcgatggtgacgatatcgcgcagggaaacgccttcggtcagcagcgcccggtacactttcagcaactggctgtaattgagcaccgcgcttaaatcctccgccaggcgcggtgccatcgacgacaaacggttatgcaactgcgtaatatcgtcatagttaaataaatcaggaatatagctgcgcacaatcttatttacatgggtagcaatcacgctggcgctgtcgatcacctgataccccatattcagcgccttcgctttctgcgcaggctggatccaggtcaccggcatcccgtacgccgggtcgttccccagcacgccgtctatctcgccgtaggtttcgctggagggcagcgccatcagtttatccgccggaatatccgcttcatcagccttaatgccgttgatgaaaatagcgtactggctgggcttaaggcggaagttttcccgaatgcggatctccggcagcagcacgccgttgccgtcggatatcacctgtcgcacgccgcgaatacgctgggtgagcgggttgccctgggctttgtccaccagcgccaccagcttgtagccgaggcttaagctgatgggctcgatcagcggaatggtttcccaactgacctgttgctcgctggtttcggtgatggtgcgggtcagcgtttcgagacttttctcttccgcttccgccgcctgcgggcgtttgctcatccgccagccggtaaagccaagcagggcgctgaacagcaaaaacggcagatgtggcattcccggcactaccgccagtacgaacataattccggtagcggtgtagagcaccgatgggcttgccagcaactggttacgcacgtcatgggcgatatcgccgttgtcgctgacgcgggtgacgataatcgccgccgcggtggagagtagcagggaagggatttgcgccaccagcccgtcgccgatggtcatcagcacatactgctggaaggcggcgtcggcgctcaggttgtatttgaagatcccgatacagacgccgccgatcaggttgatcgccagaatcatcatcccggcgatagcatccccgcgcacaaatttcgatgccccgtccatcgcgccgtagaaatcggcctcgctggcaacatctttacgtcgggtttgtgcctgcgcctgattgatcaacccggcattaagatcggcgtcaatcgccatctgcttaccgggcatcgcgtccagggtaaagcgggcagaaacctcggagatacgctcggcccctttggtgacgacaataaagttgattgtcaacagcgtcagtaaatccgagcgtgaaagcattatcgccgcgctgcacgggcagtcgatttttaacggtggcgggctgtcgccgttaaataaaatcagcccgtctcatccgccaaaacctgccaccgtggcggtgccggaagaaacggagaaaaaagcgcgcgacgtcaatgagaaaacggcgctgctgaagaagaaatccgccaccgagcttggcgagctggcaaccagtatcaccaccattgcccgtgatgcgcatatggaagcgaatctggagatggagattgttccccagggattacgcgtgctgattaaagacgaccagaatcgcaatatgttcgaacgcggcagcgcgcagattatgccgttctttaaaacgctgctggtggagctcgcgccagttttcgactcgctcgataacaaaattattattaccgggcataccgatgcgatggcttacaaaaacaatatctacaacaactggaacctttcgggcgatcgcgcgctttcggctcgtcgggtgctggaagaggccggaatgccggaagataaagtgatgcaggtaagcgcaatggcggaccagatgctgctggattccaaaaatccgcaaagcgcgggcaaccggcgcattgagattatggtgctgaccaaaagtgcgtccgatacgctgtatcaatactttggtcagcatggggataaagtggtgcagccgctggtgcaaaagctggataagcagcaggtgctttcgcagcgaacgcgttaaatgctgaatctttacgcatttctcaaactctgaaatcactgtatactttaccagtgttgagaggtgagcaatgcgtaaaatcattcatgtggatatggactgctttttcgcagcggtggagatgcgcgacaatcccgccctgcgcgatatccctattgctattggcggcagccgcgaacgtcggggggtgatcagtaccgccaattatcccgcgcgtaaatttggcgtacgtagcgctatgccgacagggatggcgctcaaattatgcccgcatctcaccttgcttccggggcgctttgacgcctacaaagaagcctcaaatcatatccgcgaaatcttctcgcgctacacctcgcgtattgaaccgttgtcactggatgaggcttatctcgacgtcaccgatagcgtccattgccacggttctgcgaccctcatcgcccaggaaatccgccagacgattttcaacgagctgcaactgacggcgtctgcgggcgtggcacccgtaaagtttctcgccaaaatcgcctccgacatgaataaacccaacggccagtttgtgattacgccggcagaagttccggcatttttacaaaccttaccactggcaaaaatccccggcgtcggcaaagtctcggcggcaaaactggaagcgatggggctacgaacctgcggtgatgtacaaaagtgtgatctggtgatgctgcttaaacgctttggcaaatttggccgcattttgtgggagcgtagtcaggggattgacgagcgcgacgttaacagcgaacggttgcgaaaatccgtcggcgtggaacgcacgatggcggaagatatccaccactggtctgaatgtgaagcgattatcgagcggctgtatccggaacttgaacgccgtctggcaaaggtaaaacctgatttactgattgcccgccagggggtgaaattaaagttcgacgattttcagcaaaccactcaggagcacgtctggccgcggctgaataaagctgacttaatcgccaccgcgcgtaaaacctgggatgaacgccgcggcgggcgcggtgtgcgactggtggggctgcatgtgacgttgcttgatccgcaaatggaaagacaactggtgctgggattatgaataacatacaaataagaaactatcagcctggcgattttcagcaactatgcgctattttcattagagcggttacgatgaccgccagtcagcattattctccacaacaaattgccgcctgggcgcagattgacgaatctcgctggaaggagaaactcgcgaaatcacaagtgtgggttgcggtcattaatgcacaaccggttggttttatttcccgcattgaacattatatcgatatgttatttgttgaccctgaatacacccgccgcggggttgccagcgccttgttaaaaccatttattaagtctgaatccgaacttacggtagatgccagcataaccgcaaaacccttttttgaacgttatggttttcagacagttaagcagcagcacgttgaatgccggggagcgtggtttactaatttttatatgcaatataaaccgcaacattaaatccagcttgcaatgaaaataacgcccgcctagtatgtgcgcgttttcttattccacaaactgcaaggaggtaaatcatgacaaatcctttatcaatgactctttgcagacctttccaggattaattctttttttcttgccctggattcgtctgccatttcctgattttttaattgttactctcaataattcgagtcgcagcacatgcaacttgaagtatgacgagtctatttacggaatggtacatgggcaaatatattcgtcccttatccgatgcggtatttaccatcgcatctgatgacctgtggatcgagagtttagcgatccaacaattacacaccacggcaaatttacccaacatgcagcgcgtagtggggatgccagatttacatcccggacgcggctacccgattggcgcagcgttcttctctgttggccgtttttacccagcactggtcggcaatgatatcggctgcggcatggcgctatggcaaacagatattctcgctcgcaaatacaacgccgataagtttgaaaagcgattatcagctttggatgacgttgctgaagaaagctggctggaggaaaacctgccgtcagcatttgcacagcatccgtggcgcagctcgcttggctctatcggtggcggcaatcatttcgctgaactgcaacaagttgatcaaatcatcgacgctgaactgtttgcactggcaggtctggatgcacaacatctgcaactgttggttcatagcggctcgcggggggggcccctattaagttgtcaagcatgttatgacccctgcggggtataaaaagtcccgtcgcgcatcatggcgaacagaacgtcgcagcgtcgtctcgccagggcgataagcgcctgattgtgtcgttttccctgactcattttgcgggtgtagtaagccctggagagcggatccctgagcgcggcgaaggccgacaggaacaacgcccgtttgagagctttattaccccgtcgcgagggatgctcaccgcgtattgacgagccggatcgccgagttaccggcgcaaggccagcataagcagcgagatgtgcggcagaggcgaaggcgcggcaggcgacctcggtgaggagtctggctgcggtcctgacaccgactccgggcatactggtcaggaccgggtaaagagggtgagcaagaactcgctgttctacctcaagcgccacctcgtctctttgcttacgcagcgtgatgagctggagtgccagacgtggcagtactacggcagcggcattcgtgccgggaacgacgacggtttgttcggccagtgcctgagctatgtctgctgcaaggcgtttacccagacgaggcgcaagtttgcagagctgggctgccagcttcttctcacccagcgaagcccagcgaagcgagtttttctggtgagggatatcgctggagaagatcgagtaccgccgggtgctcaagtctcggaccgagaacgcgctccagtgccggatgtatctgggtcagaaggccgcggatacggttgctggcctgcgttgtctgtgcggcaagatcatcatcgaagccgcagagcatggagagttcggcgatttgctcgtcagccagtttcagcgtgcgtagcgcgtgaggcagggtacgggcagcttcggcaatgatggcagcgtcacgagcatcagttttagcttcaccggcgtgtaagtcggctatgcggcgcatggccagtccagggaggtatccgacaaggactccttctgagcgggcaacggcgacaggtaacgcaccgatggtagctggctgatcaacaaccagcagtatctgaccatgttgtttcaggtcagatattagcgacctgagtttgttttcgtcgttgggtaatgctttatcgaacaggcgtttacctgaacgattaatggcaacagcgtgatgcgtatctttaccgacatcaacgccgataaagacctggacggattcgtaatcgctggattcggtcattctgtctcccttgtatatgggttaaccagataaccacggggagcaggtaccggcatccacgttacagacggtcccggcaaaagtgcctgacctgacccctattagcggttaccagcgccccaccagacccggtgacatcaccccccggatcatggacgactgggggcagtaatcatgccgggtctggctggctaacaccccattataaggggtacgaataaagtaacggggcagtctattttacagcggcatattgcctcgttttcgcatcatggtttgcctgaaggcagtgacgacgcgctacggtatattgcggaacatgacgatgcgctggcgtttgcgcgtattaatcgccagctgatctctttacgcataatgcaacaggttaaggccaccggaagtccggttctggatgtggcgcataactttgttagcgcgtgtcaaatcggcgatcaacagggctggttgcatcgtaaaggtgccacgccggatgacaacggtctggtgattattcccggttcactcggtgattactcctagcttgtacagcctgttgcgaacgaaaaaacgctccactcgctggcgcatggggctgggcgtaaatgggggcgcaccgagtgtaaagggcgtctggcagcgaaatacacagcgacgcagctctcacgtactgaacttggcagtcgggtaatttgtcgcgataaacaactcatctttgaagaagcgccacaagcctataaatcggctgaaagcgtggtgcaatgtctggtgcaggctggtttaattattcctgtcgcgcggctgcgtccggtgctaacgctcaaaaacagtggagggaaaaaaggatgatcttgctacaactctcctcagcgcaggggccggaagaatgttgtctcgcagtgaaaaaggcgctggagcgattaattaaagaagctgcccgacaagacgtcgcggtaacggtgttggaaacagaaacgggccgctactctgacacgctgcgttcagctctggtttctctggatggcgataacgcatgggcattaagcgaaagctggtgcggcactattcagtggatttgtccgagtccgtatcggcctcatcatgggcgcaaaaactggtttctgggcattgggcgttttaccgctgatgagcaggaacaatcggatgcaatccgttatgagacgttgcgttcgtcggggccgggcggtcaacatgtcaataaaaccgactcggcggtacgcgccacgcatttggcatccggtattagcgtgaaggttcagtcagagcgtagtcagcatgctaacaagcggctggcacgattgctgattgcctggaagctggagcagcagcaacaggaaaatagcgcggtgctgaaatcgcagcggcgaatgttccatcaccagattgaacgtggcaacccgagacggacatttacagggatggcttttatcgaaggataatgaaggatgaaactgccggaaggcgattaaacgccatccggcagcaaatcaaataattacttcgccggaatttctttcagcagttcagtcagcagtgtccagtaatgacctacgctttcgatgtgaacttgctcatccggagagtgtggaccggtgatagttggcccgatagaaaccatgtccatttccggatacggttttttgaacagaccacattccaggcccgcgtggataatctggatgttcggcgttttgttgaacagacgctgataggtttcacgtaccagatgcatcaccggagaattagcgtccggctgccagccaggatatgcgcctttcgcttcggttttcgcgccagccagtttacccagcgaatccagcatgctcaccacgtagtctttaccgctgtcgatcagagaacggatcagacagtgaatttctacgttattatcagtcatggtcaccacaccgacgttcagggaggtttcgaccacaccttttgccacgtctgagttgcggatcacaccgttcggggtggcgttcagcagacgaataaaggtatcgcgagatttcgcaatcagggcagctttatcgttcgctacagagtccagcaacaaggccagatttttctctttctctgccagctcgtttttcaggatctcctgataggtattcaccagagatttcaggacgtcgactttatcagctgcgacagcaatggtcgcaaaggcttcacgcgggatggcgttacgcagtgtgccgccgttgaaatcgataaggcgcagatccagttcttctgcatgacccgctaggaagcgcaccagcagtttgttggcattacccaggccaacgtggatttccccgccggagtgaccccctttcagaccttttaaggttaacttgaaggtttcaaaaccagctggaaccgcttcacgatctaaatgcaggttggaggtgaagtcgataccccccgcacaacccatgtagatttcaccttcttcttcggagtcggtgttaatcagaatatcagcctgcaaccagttgctctgtaagccgaacgcaccgtccataccggcttcttcggtcatggtcagcagcacttccagcgggccgtgaaccacgttttcgtcagccagaaccgccagcgcagacgccataccaatgccgttatctgcacccagcgtggtgccgcgcgctttaacccattcgccatcaatataaggctggataggatctttcgtgaagtcatgcacggtgtcgttatttttctgcggcaccatatcgaggtgggcctgtaagacgaccgatttacgattttccatacctgcggtagcaggtttacgaatcaggatattacctacctgatcgcgttcgacatggaaacctttctcttttgcccaaccaacaatgtattcagcgagttgctcttcatgataggacgggtgaggaatagaacagattttggcaaaaatatcccacagcggctgtggagataattgagacagttcagacacgttaagtctccttgtcgatcacccgcaaaacagtattgcaggtcacagggttagcagaaaatgttgtcaacacaagacaggcttgcgagatatgtttgagaataccactttatcccgcgtcagggagaggcagtgcgtaaaaagacgcggactcatgtgaaatactggtttttagtgcgccagatctctataatctcgcgcaacctattttcccctcgaacactttttaagccgtagataaacaggctgggacacttcacatgagcgaaaaatacatcgtcacctgggacatgttgcagatccatgcacgtaaactcgcaagccgactgatgccttctgaacaatggaaaggcattattgccgtaagccgtggcggtctggtaccgggtgcgttactggcgcgtgaactgggtattcgtcatgtcgataccgtttgtatttccagctacgatcacgacaaccagcgcgagcttaaagtgctaaaacgcgcagaaggcgatggcgaaggcttcatcgttattgatgacctggtggataccggtggtactgcggttgcgattcgtgaaatgtatccaaaagcgcactttgtcaccatcttcgcaaaaccggctggtcgtccgctggttgatgactatgttgttgatatcccgcaagatacctggattgaacagccgtgggatatgggcgtcgtattcgtcccgccaatctccggtcgctaatcttttcaacgcctggcactgccgggcgttgttctttttaacttcaggcgggttacaatagtttccagtaagtattctggaggctgcatccatgacacaggcaaacctgagcgaaaccctgttcaaaccccgctttaaacatcctgaaacctcgacgctagtccgccgctttaatcacggcgcacaaccgcctgtgcagtcggcccttgatggtaaaaccatccctcactggtatcgcatgattaaccgtctgatgtggatctggcgcggcattgacccacgtgaaatcctcgacgtccaggcgcgtattgtgatgagcgatgccgaacgtaccgacgatgatttatacgatacggtgattggctaccgtggtggcaactggatttatgagtgggccatccaggcgatggtgtggcaacaaaaagcctgtgcggaagaagatccgcaactcagtggtcgtcactggctgcatgcggctacgttgtacaacattgctgcctatcctcatctgaaaggagatgacctggccgagcaagcgcaggctttgtcaaaccgtgcctatgaagaagccgcccagcgtctgccgggcacgatgcggcagatggagtttaccgtacccggcggtgcgcccatcaccggctttttgcatatgccgaaaggcgatggcccgttcccgacagtattaatgtgtggtggtctggatgcgatgcagacggactattacagcctgtatgaacgttattttgcgccgcgcggcattgcgatgctgactattgatatgccgtcggtgggcttttcatcaaaatggaagctcacccaggactccagcctgttgcatcagcacgttttaaaggctctgcctaacgtaccgtgggtggatcacactcgcgtcgcggcctttggtttccgtttcggcgctaacgttgccgtgcgtctggcatatcttgaatcgccgcgtctgaaagcggttgcctgtcttggtccggtagttcataccctgttgagtgattttaagtgccagcaacaggtgccggaaatgtatcttgacgttctggcgagtcgtttggggatgcatgatgcttccgacgaagcgttacgcgtggagctgaatcgctattcattaaaagtgcaaggattgctggggcgtcgctgcccaacgccaatgttatcaggctactggaagaacgatccgttcagcccggaagaggactcacgcttaatcacctcatcatctgctgacggtaaattattagagatcccatttaacccggtgtatcggaattttgacaaaggtcttcaggaaatcaccggctggatcgaaaaacgcttgtgttaaaaatttgctaaaatttgccaatttggtaaaacagttgcatcacaacaggagattgcaatgacgttaccgagtggacacccgaagagcagattgatcaaaaaatttaccgcactaggcccgtatattcgtgaaggtaagtgcgaagataatcgattctttttcgattgtctggctgtatgcgtcaacgtgaaaccggcaccggaagtgcgtgagttctggggctggtggatggagcttgaagcgcaggaatcccgttttacctacagttaccagtttggtctgttcgataaagcaggcgactggaagagtgttccggtaaaagacactgaagtggttgaacgactggagcacaccctacgtgagtttcacgagaagctgcgtgaactgctgacgacgctgaatctgaagctggaaccggcggatgattttcgtgatgaaccggtgaagttaacggcgtgagtgaaatgtgccggatgtatcacatccggcaatatccattaaaactgataggtcatgccaaccgcgacaatatcatcattattaatattcaatttgttatcgctatccagttggttgattttataatcaacaaacgctgacatatttttgttgaaataatacgtagcaccgacgtcgatataattgaccagatcttcatcaccgataccttcaatatctttccctttcgataagacataacccagcgatggacgcagaccaaagtcaaactggtattgagcgaccgcttcaaagttctgtgtcttattggcaaagccgccagttattggcgtcattttgcgtgtttcagaatagaaagttgccagataaatattattggcatcgtatttcagacctgttgcccatgcttctgcacgcttgcctgtgccacggctttgcaggttctgctcgttggtgcgatctgagttggtataggccccactaatggcgaaatcgctgccgccaaagtcatatgtcaatgacgtgccgaagccatcgccgttttgctttttaacgtcgcggttttcgtttttcccttgatattgcagggttaagttcaggccatcgataacgccgaagaagtcggtgttccgatacgtcgccagaccgctggcgcgtttggtcataaagttgtcggtctgcgccgaggaatcgccaccaaattccgggaacatatcggtccaggcttccacgtcatacaacgcgcccaggttacgaccataatcgaaagaacccaaatctttatatttcaacccggcaaaagcgagacgcgttttctgctgtgcagtatcactctccgctttatttccggcaaactccgcttcccaccgaccataaccagtcagttgatcgttaatttgtgtttcacctttaaaaccaaaacggatataactctggtcgccatctttactggcgttatcactcatataatgcatggctttaactttgccatagacatccagtttattaccgtctttattatatatttctgcagcctgtacagatgcagatgccacaatgcccatcaccactaatgccagagtgctctttttcattttcattcctgattttaattaacgcgcgaatattcagcgggagagccccgttgaaaacaggaaagtttttaacctgagattgttaaagatatattacagattaataatattcttaaaatgtggtaatttattaaatctgtaataaaagcgtaaacaactgccgctaggcttgctgatcccgcgcaacaaaacgccatgctttgctcgcagatggttggcaaccgacgacagtcctgctaaaacgttcgtttgatatcatttttcctaaaattgaatggcagagaatcatgagtgacagccagacgctggtggtaaaactcggcaccagtgtgctaacaggcggatcgcgccgtctgaaccgtgcccatattgttgaacttgttcgccagtgcgcgcagttacatgccgccgggcatcggattgttattgtgacgtcgggcgcgatcgccgccggacgtgagcacctgggttacccggaactgccagcgactatcgcctcgaaacaactgctggcagcggtagggcagagtcgactgattcaactgtgggaacagctgttttcgatttatggcattcacgtcgggcaaatgctgctgacccgtgctgatatggaagaccgtgaacgcttcctgaacgcccgcgacaccctgcgtgcgttgctcgataacaatatcgttccggtaatcaatgagaacgatgctgtcgctacggcagagattaaagtcggcgataacgataacctttctgcgctggcggcgattctggcgggtgccgataaactgttgctgctgaccgatcaaaaaggtttgtataccgctgacccgcgcagcaatccgcaggcagaactgattaaagatgtttacggcattgatgacgcactgcgcgcgattgccggtgacagcgtttcaggcctcggaactggcggcatgagtaccaaattgcaggccgctgacgtggcttgccgtgcgggtatcgacaccattattgccgcgggcagcaagccgggcgttattggtgatgtgatggaaggcatttccgtcggtacgctgttccatgcccaggcgactccgcttgaaaaccgtaaacgctggattttcggtgcgccgccggcgggtgaaatcacggtagatgaaggggcaactgccgccattctggaacgcggcagctccctgttgccgaaaggcattaaaagcgtgactggcaatttctcgcgtggtgaagtcatccgcatttgcaacctcgaaggccgcgatatcgcccacggcgtcagtcgttacaacagcgatgcattacgccgtattgccggacaccactcgcaagaaattgatgcaatactgggatatgaatacggcccggttgccgttcaccgtgatgacatgattacccgttaaggagctggccgatgctggaacaaatgggcattgctgcgaagcaagcctcgtataaattagcgcaactctccagccgcgaaaaaaatcgcgtgctggaaaaaatcgccgatgaactggaagcacaaagcgaaatcatcctcaacgctaacgcccaggatgttgctgacgcgcgagccaatggccttagcgaagcgatgcttgaccgtctggcactgacgcccgcacggctgaaaggcattgccgacgatgtacgtcaggtgtgcaacctcgccgatccggtggggcaggtaatcgatggcggcgtactggactgcggcctgcgtcttgagcgtcgtcgcgtaccgctgggggttattggcgtgatttatgaagcgcgcccgaacgtgacggttgatgtcgcttcgctgtgcctgaaaaccggtaatgcggtgatcctgcgcggtggcaaagaaacgtgtcgcactaacgctgcaacggtggcggtgattcaggacgccctgaaatcctgcggcttaccggcgggtgccgtgcaggcgattgataatcctgaccgtgcgctggtcagtgaaatgctgcgtatggataaatacatcgacatgctgatcccgcgtggtggcgctggtttgcataaactgtgccgtgaacagtcgacaatcccggtgatcacaggtggtataggcgtatgccatatttacgttgatgaaagtgtagagatcgctgaagcattaaaagtgatcgtcaacgcgaaaactcagcgtccgagcacatgtaatacggttgaaacgttgctggtgaataaaaacatcgccgatagcttcctgcccgcattaagcaaacaaatggcggaaagcggcgtgacattacacgcagatgcagctgcactggcgcagttgcaggcaggccctgcgaaggtggttgctgttaaagccgaagagtatgacgatgagtttctgtcattagatttgaacgtcaaaatcgtcagcgatcttgacgatgccatcgcccatattcgtgaacacggcacacaacactccgatgcgatcctgacccgcgatatgcgcaacgcccagcgttttgttaacgaagtggattcgtccgctgtttacgttaacgcctctacgcgttttaccgacggcggccagtttggtctgggtgcggaagtggcggtaagcacacaaaaactccacgcgcgtggcccaatggggctggaagcactgaccacttacaagtggatcggcattggtgattacaccattcgtgcgtaaataaaaccgggtgatgcaaaagtagccatttgattcacaaggccattgacgcatcgcccggttagttttaaccttgtccaccgtgattcacgttcgtgaacatgtcctttcagggccgatatagctcagttggtagagcagcgcattcgtaatgcgaaggtcgtaggttcgactcctattatcggcaccattaagaaaattaataacttagcttaacttctctaagaaattgtatcttctgttatcacttacaaacgcctatacgttgttatgggctttggtagtgtaacacgtatgggcgagtagttcccaggctcaacctcgtaacaagttcctttgaagctggaagacgtgccaccgtctctaaaccttctaccaaaactcttagcaagatgttccacacctggcgcggtgtccaatgatgctacacgtcgtgagacgttgcagaggataaacaggctaaatgatgggaagagttttaagtgcaatagtggattaaagcccacctcttcaaaacctaacttgatcgggaaagaatcaagctctagcacggtttcgtccaccggagtacaacgggtgcctgataagagaagaactgctaagacttcatagcttttgtgaaaaagccctttttagtggatacgcctacggcgcttattttttggtataaccatcaaaggcgctttatggctcctattgtcttgaaaatgtatctttacttgtattgtgttttatgcgtagtctccctgtgtagtatgtaacttgttaattttcatatgaatacagaggcacacgatgaaaaacattgcagcaatcaaacgtaataaccgcaagattcacgctcgtaagttcctgtctacgccagaaggaaaagcctggctagagcgtaaacagagagagaacgaagaaagaaaactccttagtgagttgaaatggcttagagaggatttctgaaaatctccagaacgcaacaggacgcattctaacgctgttttcattactcggtatagggataggtgatgtgtgtttaatgcgtctgtgcgcttgttttgtgccttattttgcattttcataatgcggaagagaacacggaaaaccttaaaattaattattggggtatttaaggctattttcaggtgatttaagggtattaaacttgattaaaatataaacagataattatgtatcttattgatttataaggttatttttaagtaaaggtaaataaaaaataaatagccataaatagctataaatacatcttaatacctatatcccttcccttatggctagattgcgagaggtgcttaacgcgattttcagcgccccccgatctggaaaatccagaatccccaaatatcagcaaggaattttcttgcgtaatcaacatcgtttttacctattaaatcattacacagaaagcctttctgtaatgtctctcactaaactttcactaaacacgagaatgatcggttttatgtcggatcagatgctagaaacagcaccacgtctcacaagggctgtaagcgatgaaaccagtgtttatgcgggtgcaggtcaaaatataggccaaaaatgtgctaaggaacacatataacgccttgaattgatgtatcaggggaaaagtgatggattttttacgtaggagcacgaaagggcttctattgacttttgtatgctatgaaatataattaaagttttttgtttttattgtgtgatgtggtgggttacacaggggaatagattaaatggtgttctgtttatacaggtttatttgttagatcaacaatttggcatttctaaacagatgtttgaacgttgccaaatgtcttgacaacacaagaaaagggcttgctatgccaggcattacacgaaataaggctataaaaacaaaataaattttaaaatttgcacaaacgagaaactcgttcagaaacaagcagaacaatttttagccaacaatttctgatggtgctctgtaagccgcattacacaaggctttgcgaaagtgatgtaaaagtgaagaaagtaagaattgaacttttaagctacttttcattggattttttagtagggaattacacagggaatagagagcattattctatgatttacacagggaatatagggggattatggcacacacatagaaagacattacacagagtgctatgtgacaaatggatgtaacgagaggttacattcatttatctgaaatgctctctgtaagaaagttggtagtaacgatatgttacatagactaattattgaatgtaacgatattacacatcggtagtaacgatacgttacatcggaagatgattggatgtaacggtagctcacagtgaactaggggtaggtcatagtgaactacccccacagaattctgttacccctatcaagtctgatacccctatcaaaactgatacccgataagtataaataacacctaaatagctgcgcggaatagtagatcactttgagggaacttagcccggattgtgcgatctgatcaatcgccaaatcaaaacaaatcaccaaccggactgagcaatgccgatcatagcaccaatttcccgtgacgaacgacgcctgatgcagaaagccatccataaaacacacgataaaaattatgcccgcagactgactgccatgctgatgctgcaccggggcgaccgtgtcagcgacgttgccagaacgctctgctgcgcccgttcctctgttggacgctggattaactggttcacgcagtcgggtgttgagggactgaaatcattacctgccgggcgtgcccgtcgctggccgtttgagcatatctgcacactgttacgtgagctggtaaaacattctcccggcgactttggctaccagcgttcacgctggagtacagaactgctggcaataaaaatcaatgagataaccggttgccagttaaatgccggaaccgttcgccgctggttgccgtctgcggggattgtgtggcgaagggctgcgccaactctgcgtatccgtgacccgcataaagatgaaaagatggcagcaatccataaagcactggacgaatgcagcgcagagcatccggtcttttatgaagatgaagtggatatccatcttaatcccaaaatcggtgcggactggcaactgcgcggacagcaaaaacgggtggtcacgccgggacagaatgaaaaatattatctggccggagcgctgcacagcgggacaggtaaagtcagctgtgtgggcggcaacagcaaaagttcggcgctgttcatcagcctgctgaagcggcttaaagcgacataccgtcgggcgaaaaccatcacgctgatcgtggacaactacattatccacaaaagccgggaaacacagagctggctgaaggagaacccgaagttcagggtcatttatcagccggtttactcgccatgggtgaatcatgttgaacggctatggcaggcacttcacgacacaataacgcgtaatcatcagtgcagctcaatgtggcaactgttgaaaaaagttcgccattttatggaaaccgtcagcccattccccggaggcaaacatgggctggcaaaagtgtagcggtattaagcgcagctatttaggaaatgatttccgatctatttaggaagtaacctaggaagtggtttcctacctacttaggaaatgacttccaccaatactataattaaatactataaataatattctttatactatataggtcactgtgaactaggggggtagttcactatgagctagggggtaggtcactgtgggtgatgctgccaacttactgatttagtgtatgatggtgtttttgaggtgctccagtggcttctgtttctatcagctgtccctcctgttcagctactgacggggtggtgcgtaacggcaaaagcactgccggacatcagcgctatctctgctctcactgccgtaaaacatggcaactgcagttcacttacaccgcttctcaacccggtacgcaccagaaaatcattgatatggccatgaatggcgttggatgccgggcaactgcacgcattatgggcgttggcctcaacacgattttacgtcacttaaaaaactcaggccgcagtcggtaacctcgcgcatacagccgggcagtgacgtcatcgtctgcgcggaaatggacgaacagtggggctatgtcggggctaaatcgcgccagcgctggctgttttacgcgtatgacagtctccggaagacggttgttgcgcacgtattcggtgaacgcactatggcgacgctggggcgtcttatgagcctgctgtcaccctttgacgtggtgatatggatgacggatggctggccgctgtatgaatcccgcctgaagggaaagctgcacgtaatcagcaagcgatatacgcagcgaattgagcggcataacctgaatctgaggcagcacctggcacggctgggacggaagtcgctgtcgttctcaaaatcggtggagctgcatgacaaagtcatcgggcattatctgaacataaaacactatcaataagttggagtcattacccacaaagcgaagtagacaagattgggtgatgctgccaacttactgatttagtgtatgatggtgtttttgaggtgctccagtggcttctgtttctatcagctgtccctcctgttcagctactgacggggtggtgcgtaacggcaaaagcactgccggacatcagcgctatctctgctctcactgccgtaaaacatggcaactgcagttcacttacaccgcttctcaacccggtacgcaccagaaaatcattgatatggccatgaatggcgttggatgccgggcaactgcacgcattatgggcgttggcctcaacacgattttacgtcacttaaaaaactcaggccgcagtcggtaacctcgcgcatacagccgggcagtgacgtcatcgtctgcgcggaaatggacgaacagtggggctatgtcggggctaaatcgcgccagcgctggctgttttacgcgtatgacagtctccggaagacggttgttgcgcacgtattcggtgaacgcactatggcgacgctggggcgtcttatgagcctgctgtcaccctttgacgtggtgatatggatgacggatggctggccgctgtatgaatcccgcctgaagggaaagctgcacgtaatcagcaagcgatatacgcagcgaattgagcggcataacctgaatttgaggcagcacctggcacggctgggacggaagtcgctgtcgttctcaaaatcggtggagctgcatgacaaagtcatcgggcattatctgaacataaaacactatcaataagttggagtcattacccaagattgctcaacagaaagctaaaacagaaaagcagaatcaaagagcacaagctgccgcagcaagagcacaggcaaggcaacagcaacaaatagcagcacgtaaagagaaagcagaattaaaactccttgatgtatcaagctctatcagtgcaatgcaccgtctctctgtagcggaacaatacaaagctattgcacaggctagagagatagcaaaacaatatgagcaaggggctatcagcctggcgcgtatgaatagtcagatgaaacgcctacaacagcaacaacgtaagattaatggcaacagaaaagctcaatttgcccccgttaagggaggatcagggaattccgccacgatgggcgctctgttatttggaggcgctacggctgctgctggcgtgatggctgttagtaaaacctctgaatttatggctaacagctttgctaatgctgaaacagaaggggagctaatccaacgtgcaaggcttggtggagttgattacaacttacttaataatcttgagcgttgggcgtatgacaacgggatcgatagcctccagggtgatccgggacgcagaaaaatactagatgccatcggtaaagatgtaaaggaacgcgctaccaaaagctatgacgaggctgaatatgtagttgataagaaaacagggaaaggcatatggaagggcggtgattctggtattaacactgaggtgtactggcaatagcggacactaccatttgttctttttttaagcagccatctgatgatatttttccctgaaggctgccggggagatattccccagacgagagtgacgacgctgacgattgtagaaaatctcaatgtattcccgtattactgagatggcttcatcccggttattaaaacgatagtggctcaggctctcatttttcagcgttccccagaagctttccatcggagcgttgtcgtaacagttacctttacgcgacattgatgttttcagaccagactgctcctgtatgacccggtaatcgtatgcgcagtactgtgaacctcgatcagagtggtggattagcccggcaggtgggcgctggctcctgagcgccataaacagggctttacctgtcagctcttttgtcatgcgctctcccatggcgtagccgacaatttcgcacgtataaacatctttgatgccagcgaggtacaaccatccctcctgtgtggcaacatacgtcaggtccgccacccagacctgatttggtgctgtaggagcgaacgtctggttcagcagatttggcgcaactggcagattgtggttcgagttcgtagtcgctctgaacttgcgtttctgcttacagcgtagccttagctccttacgaagacgtgccagtcggtcacgaccaacgatgatgccattctctgccagctccgtctggagccgccgggttccatatgtttcgcgagtgcggatatgtgccaccttaatctccagttttagccgctcatcactttgttttctgtctgagggttcatgctgtacccagttgtaataaccgctcctggatacaccaaatacctgacacatcgcttcaatgggaaattgttgtcgccattgttcgattaacgcgtatttttcagcgactcctgtgcaaaatacgctgttgctttttttaatatatctcgctcaaggcgagcttcatttaacgccttacgcagttgcagaatttcagattccagttcagccaccgtgcgggaaccaggagtaccgagcccttttctggcggcggtaacccattgtcctaaagtgccttcaggaagagataatcgggaagcgccttcactgatcgaaagttgattttcaagaaccgttctgacagcttcggctttgaactctttagagtaacgttgggtttttctgctcattattagctccttctgatgccattctatttcaggaaggagtgtccgttaaactcaggctacctcacactttaatgaatgaaggattcttaactaaaaaggatttgaaagactttgccaataactctgctggtttaatttcaaaagctgtcaacggaatggtgaaaaagggctataccgacgcacagatcggtagtcgtctggaagatttagcggacgacctcctcttaacttctaaatattggcaaagatcagccagagaggtgcaggcaagcattacccagcaaaaagccgccggacaatggctaacagaaacacagtagactggccccctgaatctccagacaaccagtatcacttaaataagtgatagtcttaatactagtttttagactagtcattggagtacagatgattgatgtcttagggccggagaaacgcagacggcgtaccacacaggaaaagatcgcaattgttcagcagagctttgaaccggggatgacggtctccctcgttgcccggcaacatggtgtagcagccagccagttatttctctggcgtaagcaataccaggaaggaagtcttactgctgtcgccgccggagaacaggttgttcctgcctctgaacttgctgccgccatgaagcagattaaagaactccagcgcctgctcggcaagaaaacgatggaaaatgaactcctcaaagaagccgttgaatatggacgggcaaaaaagtggatagcgcacgcgcccttattgcccggggatggggagtaagcttagtcagccgttgtctccgggtgtcgcgtgcgcagttgcacgtcattctcagacgaaccgatgactggatggatggccgccgcagtcgtcacactgatgatacggatgtgcttctccgtatacaccatgttatcggagagctgcccacgtatggttatcgtcgggtatgggcgctgcttcgcagacaggcagaacttgatggtatgcctgcgatcaatgccaaacgtgtttaccggatcatgcgccagaatgcgctgttgcttgagcgaaaacctgctgtaccgccatcgaaacgggcacatacaggcagagtggccgtgaaagaaagcaatcagcgatggtgctctgacgggttcgagttctgctgtgataacggagagagactgcgtgtcacgttcgcgctggactgctgtgatcgtgaggcactgcactgggcggtgactaccggcggcttcaacagtgaaacagtacaggacgtcatgctgggagcggtggaacgccgcttcggcaacgatcttccgtcgtctccagtggagtggctgacggataatggttcatgctaccgggctaatgaaacacgccagttcgcccggatgttgggacttgaaccgaagaacacggcggtgcggagtccggagagtaacggaatagcagagagcttcgtgaaaacgataaagcgtgactacatcagtatcatgcccaaaccagacgggttaacggcagcaaagaaccttgcagaggcgttcgagcattataacgaatggcatccgcatagtgcgctgggttatcgctcgccacgggaatatctgcggcagcgggcttgtaatgggttaagtgataacagatgtctggaaatataggggcaaatccatcacattctccattaattcttcgtgatatcgcacattttcgttatgcccagggccctaagtgtatcaaaaacagcaaggtcgaaggcaaaagcactggtagcgtctgcttcgttgtccccgaaaatagagaggtttcagtcctacattattaatgaattttttgcataagtgatatcaaaatccacatactaatttgaggttatgttttaacgtagactcattgttcatgcctaatggagggactgacagtggaattttccgtattaagtaacaatctgaaaatgccgatgatgggatttggtgtttttcaggttaccgataaaaacgtgtgcaaacagtcagtgttgaacgctatccgcacgggttatcgactcatcgacactgcagcggtatacggtaatgaagatgccgtcggtgaagccgttcgtgaagctatatctgaaggtttatgtacccgagatgagttatttataacgtctaaattgtgggggcaggatatgttgaatcaggatacggcagcagcaggtattgaagcatcattaaaaaaatcgggactagagtacttcgacctctatttattgcaccaggctatgcgcgattatttcagtgtgtggcgtgcactcgaagatgcctatgaagagggcaaattaaaagcaattggggtttccaatttctatcctcatgttctggcgaacttttgtgaaacggtaagagttaaaccgatggtcaaccaggtcgagttgcatccctattttgcccaaccagaggcgctggcaaccatgaagtattataacgtgcagcctgaagcatgggctccgttaggtggtggacgacataaaccctttgaaaataatctgcttcagagtattgcagatgcccatcaaaaatcgatttctcaagtcattctgcgttggaatattcaacggggagtggtcgttattccgaaatcgacacatcaacagcgtatcgaagaaaattttgctatctgggatttctcactgacagagaaagaaatggcacaaattagttcgcttgatttgggttatgttggggagtcggtaaaacattttaatcctgaatttgttcgtggttgtcttgctgtaaaaatacatgattgatattaatcatatattttacctgagacgacaagaatcttttaacaggggagtgatattgatcttcactctgtcatatctccggtaatatggcgtcaggcttcatcatcagaaagggggcctgacgcctgaaaaagtgaacaacagacagtgttcggattatcaatattcagtttttaacgttgaactggattcattactgcgttgtttaagaatttcccgcgccgaatctgccattatcatgacagcacctgccagcatcagagtatctttcaataccaagcgaccagcaccggataaataagggaaaccatgatgagcgtcacccaatgcgggtacccatgcctccggggtggtgattaaaaatgagagtgttaccagcggcgtggtatatgccatcagtcctcccaataaacctaaccagcgattgacaggattagccaaaaccagcagagcaataatcacctccacgacgccaagaccgttggaaaaaccataggtattattggccgattgccatgcccttgcttctggtttgtattcgccttcgtgagtcagatactgtttatagtcttccgggtgttcataaaagaacgacattagtggactgtttgcgacgaatggtgtaatgctgtctgcctcgtaagggacaaactttaataacccaatccacataaaaacaatcgcaatactcagacgaatcaatgacaggccaattttatctccccgacttaacaggtgcaggtatttttccattgtgaacatccttatttatacaatactgctgttgcggttgaattattatcaattcgcatcgatgtgactttccaggatgaagcattatattttctggctatatcagcaatggtatcctccagaactgtcggtgatgctgatactgacgagacgctgatatgtttcagaattattttatcatctgcattggtggaaaattccataacgccagataatagtgttgcaaataaaacagattttttaaacatataaaataccatcaatgaagtgattaagaagttatagagtaacagagaattaataagattcttttctctgagacgccagaatatttgttctggcgtctgattttgagtttatttgactaatgaaaatagatcattgagtgattcgctcatcgacggatgagtaaatatctgatcgcgtaatatgctataaggcagcccggcatccatcaccattttcactatattgatcatctcgtgggagtcaacacacagcagtgatgcccctaatatacgttgggttttattatcaacaatcgcttttaataccccacgagtatcattcatcactctggcacgcggaattgcagctacaggcaatgtcaccacctgaatatcagcaccactctctctggcctgttcttctgtcataccaaccctggacagtggcggtgtcatgaatacggaataaggcacatttttccgatcatcagtactacgtctgccttctcccagcaactcatcacgcacaatgcggtaatcatccagtgaaatataagtaaattgcagcccgccggtaacatctcccatcgcccaaatattgtctgcggtggtatgtaattgcttgtcaacgacaattgccccgcgctcgtttactgcgataccggcattttctggatgtaacgaagcggtagccggttgacgaccggaagctattaacagtgcatccaccgccagttgggcgtgctcgctatgcacttgcacttgattttcatggtgactgattcgctccacatgggcattgaggataatatcgacgccctgatcgcgtaaaatcgtcgcgatattatcagcaatatcccgatcttcccgaggcaaaaacagcgaagctgcttctaaaatggttaccttgctgccaaaattagcgaacatagaggcgaactcaacgccaatatatccgccgcccaaaatacctaaatgcccaggcaattcttttagattaagtaatccggtgctgtcatatacaccaggcgtggtggtaattccaggaattggcggaaccacggtttgtgcaccggtattaataaaaattttctcgccatgaatttccagatttccctcaggccgatgaacacgcaggctatgattattgataaactccgcctggccgtcgatcacgtcgatattgggcatatccgcaagattatgaaaattcttattacgtaaaaaattaaccacttcatttttacgctgtatggcacggacaaaatctgtgtgctgctgtgcgtcatgaaccaatgttttggttgggatgcagccgatattaatacaggtcccgccatacattgcatttgattgttcgatgagagccactcgccaacctgcttttgccagcgtgacggctaatgtttttccagccttgccaaaaccaataataactgcctgatatttattcatgatgatttcctgtcgaaacacgttcatttgacatcatgactatagacgcaaaagagcaaataccatttcttcacaacgcttgatattttgtcttatcgtctggtattttctttttcttaatcagaatcacaaaacaaaaatcatgattaaccatttgatggtattagattagttatttactaagattgttggtgtttgtaatcaaaaaccactcaggagtctgatatggatgcccttagccgtttgttgatgcttaacgctccacaaggaacgatcgataagaattgcgtgttaggaagtgactggcagcttcaacatggtgccggggaattatcggttattcgttggcatgcgttaacgcaaggagcggcgaagctggaaatgccgacgggagagatttttacattacgcccgggaaatgtggtcctgctaccacaaaattcagctcatcgcctgagtcatgtcgataatgaatcgacctgtattgtctgcggcactcttcggttgcaacattcggcgcgttattttttaacgtctttgccggaaacgctgtttttagcaccggttaaccacagcgtggaatataactggctgagggaggcgatcccgtttttacaacaggaatccagatcggcgatgccgggagtggatgcactgtgtagccagatctgcgctacattctttaccctcgcggtgcgtgagtggattgcacaggttaatacagagaaaaacattctcagtttgcttctgcatccacgtcttggtgcggtaatacagcaaatgctggaaatgccaggacacgcctggaccgtcgaatcgctggccagcatcgcccacatgtctcgggcaagttttgcccagcttttccgtgatgtttccggaaccacgccgctggctgtattaacaaagttgcgtctacaaatagcggcccagatgttttcccgggaaatgctccctgttgtggtgatcgctgagtcagtaggctatgccagtgaatcatcttttcacaaggcgtttgtccgcgagtttggttgtactccgggagaatatcgggaaagggtcagacagcttgcaccctgaataaaaccgccagaaatcagggcaaagataatccgcattccgggagttgtgagcctttcaactatttctatttccaacggtggtttgggctttatatatttttttctgatggactctagctcagtttttaaataaaaatgcaaactaaattgcttcaattaaataaaaccccgactattacttgatacgtgattattgtcggtgatttttttgtacaccatcagtgtatatctcaataacccctgaataagtagctctgaataggtataagggatgtagcctttttaaatggatttcttatgccaaaaatgaacgtcgatttccccataaaatgtgagcgatgccgaaagaaataaaattagttattgcatttgaagtttggatgaaagattatcatttgtcacacaaatgaggggtggtatgttgctagccaattaaaaaagaacgccatatttattgatgattgatcccccggaaggaggggaaccatcgggcataaatgggcatgaagtaatggagtattagttgtgaatgtcaatttctttgtcacctgtattggtgacgccctgaaatcaagaatggcacgagactccgtgctgctactggaaaaactcggctgtcgcgtaaatttcccggagaaacagggatgctgcggtcagcctgcgatcaatagcggttatatcaaagaagcgattccagggatgaaaaatctgatcgccgcactggaggataacgacgatcccattatttcaccggctggctcttgcacctatgccgtaaaaagttacccgacgtatctggcggatgaacccgaatgggcatcacgtgccgaaaaggttgccgcgcgtatgcaggatctcacctcttttattgttaataaattaggggtagtcgatgtaggtgccagtttgcaagggagagctgtgtatcacccatcttgtagcctggcccgtaagctgggagtgaaggacgagccacttacgctgctgaaaaatgtgcgtggactggagctgttgacctttgctgaacaggatacctgctgcggatttggcggcacgttctcggtcaaaatggccgaaatatccggcgagatggtgaaagaaaaggttgtgcacctgatggaagtccgccctgagtatttaattggtgctgacgtgagttgcctgctgaacatcagtgggcgattacaacgggaagggcagaaagtcaaagtgatgcatattgctgaagtgttgatgagccgctgaggatataaagatgtcgatcaaaaccagtaatacagattttaagacacgcatccgtcagcaaattgaagatccgatcatgcgcaaagcggtggcaaacgcgcagcagcgtattggggcaaatcggcaaaaaatggtcgatgaattggggcactgggaggagtggcgcgatcgggccgcccagatacgtgatcatgttctgagtaatctcgacgcttatctgtaccagctctcagaaaaagtgacgcaaaacggcggtcacgtctggtttgcaaaaaccaaagaagacgctacccgctacattttacaggttgcccaacgcaaaaatgcccggaaggtggtgaaatctaaatcgatggtgaccgaagagattggtgtcaatcatgtgttgcaggatgctggcattcaggtgattgaaaccgatctgggtgaatatattctccagctggatcaagatccgccatctcatgttgtggtcccggcaattcataaagatcgccatcagatccgtcgagtgctacacgaacgtctgggctatgaggggccggaaacgcctgaagcgatgaccttattcatccggcaaaaaatccgcgaagatttcctcagtgctgaaataggtattaccggctgtaatttcgcggtggcagagacaggttcggtatgcctagtgaccaatgaaggtaatgcgcgaatgtgtaccacgctgcctaaaacgcatattgcagtgatgggaatggagcgtattgcccccacgtttgccgaggtagatgtattgatcaccatgctggcgcgcagtgccgttggtgcacgtttgacgggatacaacacctggctgacaggaccgcgcgaagcggggcacgttgatggtcctgaagagtttcatctggttattgtcgataacgggcgttctgaggtgctggcctctgaatttcgggatgtgctgcgctgtattcgctgcggggcttgtatgaatacttgtccggcatatcgccatattggcggtcatggatatggctctatttatccagggccaattggtgcggtgatttctccgctacttggcggctataaagattttaaagatttaccctacgcctgctctttatgcactgcttgtgacagcgtgtgtccggtgcgtattccgctgtcaaaactgattttgcgtcatcgtcgggtgatggctgaaaaagggatcaccgcaaaagcagagcaacgggcgataaaaatgttcgcttatgccaatagtcatccaggattgtggaaagtcgggatgatggccggcgctcatgcggcaagctggtttatcaatggcggcaaaacaccactcaaatttggcgcgattagcgactggatggaagcacgcgatcttcctgaagctgacggagagagtttccgtagttggtttaagaaacatcaggcgcaggagaaaaagaatggataatcggagcgaatttttgaataacgttgctcaggcactgggtcgcccgctgcgacttgaaccgcaagcagaagatgcgccgcttaacaactatgctaacgagcggcttacccaacttaaccaacagcagcgctgtgacgcgtttattcagtttgccagcgatgttatgttgacgcgctgtgagctgaccagcgaggcgaaggcggcagaagctgcaatacgtctgtgtaaagagctgggagatcagtcggtcgtgattagcggtgacacgaggctggaggaattggggattagtgaacgtttgcagcaggaatgcaatgccgttgtttgggatccggcgaaaggtgccgagaatatctcgcaggcagagcaggctaaagtgggtgtcgtgtatgctgaatatggtttaaccgaatcgggaggcgtggttcttttttccgccgtcgagcgcgggcgttcattgagcctgctcccggaatcttctctttttatcctgcgtaaaagcacaatcctgccgcgtgtagcgcaactcgcagaaaaattgcatcagaaagcgcaggccggtgaacgaatgccgtcatgtattaacatcatcagtggtcccagctcaacggcggatattgagcttatcaaagtcgtcggggttcatggtccggtgaaagcggtgtatctgattattgaggattgctgagagagatatgagatctgaacataaacctgaagaaggcatacgaggttgaaaatagcgttaaggacaacctgacttaaccccgttccgtcatggttatgctgctcttctgtaaatatcctggcattagtaatgccaggatatttacagtgaaaaagacaggcatccattcctgaaaacgggttcccttcccggtcattgtcacttcagctttatacaggcactctctatcagaatgctgtttattactgcccagagttttgttggtattcatctaccatttttttgacaaggcaaaacattacagaaattacaatgcttagaaaaaatcccagagccaggcaaatggcagcagggtatttattttttatttctggtgagcttatagttacacagccatcaccgttcggatacaatgaccagttcctggtcaggtatatcatttttgtataaagctcactgttaattgctgaaggtatttgtatctcatcgagaacttgcctgccattatggtattctgacgcataccatttgataatagacgcctgcacgcgagatatttccgcttcagcagttggtaaatctctcttatctcctgaccattccagctttatttctctgttcttgacatctgggctggtgtgaaaaaatgtagtaattcgctgtataacatcttcagtcattgtggtctgacaggcaaagttattattgctatcacagttaacaagtatgcctggtgttgtctggtttatttttaggctgtaactcacttttatattatctttattgacatacagaaataaaagcaccattgccatacagatagctataataaaaaggataacacgaatctttttcttcagataaaataaaatctcaatcagatcgatatcctgtttgatttgttcactcataatatatccagaaaataaaatctgccgcagataaggttgtattaatagtctgtatcaggaatgttcggggtaaatatcagcaaaaaaccagcatcatgaatactggatatgaagcatgagagttacctcagtgtttatataaggattcggtccccctctctggaacggtaactctcaatctgatcggttcctgcgttagttcacatcacgactcattttttcgctctcaccggcatcccatttgccacaaaatatcccgccgtgctcctcggcagcgcttcctgtccacgaatcatatccgctattttctcgccaatcataattgtcgtggcgttcaaattcccggtgataatctgcggcataattgacgcatccaccacgcgcaggccttccagcccatgcacgcggccttcgccgtcaaccacggacatctcgtcgtaacccattttgcaggtaccgcacggatggaaggcggtttcggcgtgattacgcacgaactcatcgagctgctcatccgtctgacattccgtgccggggctgatttcgcggccacgatactgatccagcgtcggttgatgcatgatctcccgggtgatgcgaattgcgtcgcggaactcctgccagtcctgctcgtgtgacatgtagttaaacagaattgccggatgctggtgcgggtcgcgggatttaatccgcacatgcccacggcttggcgagcgcattgagccgacgtggcactggaaaccgtgctccttcaccgcattcgagccgttatagttaatcgctactggcaggaaatggtactgaatattcggccacgcaaattcctctcggctgcgaataaatccgcctgcttcaaagtggttgctggcaccaacgccagtgccgccaaacagccactccgcaccgattttcggctggttccaccactgcagggcagggtagagggaaaccggttctttgcactcatattgcagatacatctccagatgatcctgaagattttcgccgacgccgggtaattcatgcaccagcggaatatcaaactccgccagcagttcagcgttgccgacgccggagcgttgcaggatctgcggtgaggcaatcgcgcctgcacataacagcacttctttgttggccgttgcgcgggttgggatggtgctgtcgccttccagccattcgacgcccaccgcgcgtttgccgtcaaaaatgatgtgatcggtcatagcgtgagtacgaatggtcaggttagggcgcgatttggcctgatcgagataaccgcgcgcggtactggcgcgacggccctgcggcgtgacggtgcgatccatcggaccaaaaccttcctgctgataaccgttgagatcgtccgtgcgcgggtagcccgcctgcacgcccgcttcaatcatcgcttcaaacagcggattgacgccgggtttggaggtagtgacgctcaccgggccatcgccaccgtggtagtcgttctcgcccacatcgcgagtctcggccttgcggtagtagggcaggcagtcgagataactccagttctccagaccgggttcttgcgcccagttatcgagatccagcgcattgccacggatgtagcacatgccgttgatcagcgacgatccacccaggcctttaccgcgtccgcactccatgcggcggttattcataaacggttcaggctctgtttcataggcccagttgtagcgtttgccctgtagtgggaacgccagcgctgcgggcatctgggtgcggaagtcaaagcgatagtccgggccgcccgcttcaagcagcagcacggaggtattcggatcttcagtcagacgggtagcgagaacgttgccggctgagccggcaccaataatgatgtagtcaaattgcaaataaacctcctggttagaatatggactggaatttagccatctcaacctggatggacttcacctgggtgtaactctggagcgtcatcacgccgttctcgcgaccaatgccggagtgtttgtagccgccaacgggcatctctgccggggattcgccccaggtgttgatccagcaaatacccgcttccagctgatgaatgacgcgatgcgcgcggttcaggtccgccgtcacgatgcccgccgccaggccgtagtcggtatcattggcgcggcgaatcacttcgtcctcagattcataagtgagaagcgacatcaccggaccgaagatctcttcgcgcacgatggtcatttcgtcgcggcaatcggtgaacacggtcggtgcaacccatgcgccgttatcgaagccatcgcctttcagtacatcgccgccgcacagtacgcgcgcgccttcctctttgcctttggcgatatagcgcagcacgttatcgcgatgcgggaagctgaccagcgggccgaagttagtttgcggatcgaaaacgtcgcccgcgcgaatgcgctcaacgcgcgccagaattttctgctcaaatgcggctttgcatttcgccggaacgaagacgcgggtgccattggtacacacctgaccggagctgaagaagtttgccatcatggcgatatcggcggcgagatcgagatccgcatcatcgaaaacgatcagcggtgatttaccgcccagttccatggtcacttctttcagggaagaggccgccgagttagccatcacttttttgccgctggcgacaccgccggtaaatgacactttggcaatgcccggatgctcggtcagatattgcccggtctccgcgcccacccccggcaacacgttaaatacgccgtccggcaggcccgcttcgctgtaaatttcagccagctttaacgcggtaagcggggtgacttcgctcggtttgaaaatcattgcgttgcctgccgccagcgccggggcggatttccacagggcaatctgaatcgggtagttccatgcgccaatccccgccaccacacccagcggttcgcggcgggtataaacaaatgacgtctcacgcaacgggatctggctgccttccagcgccgggatcagcccggcgtagtactccagcacgtccgcaccggtaacgatatcgacggttgaggtttccgaatatgcttttccggtatcgagggtttccagttttgcgagttcgtcattgcgttcacgcagaatatcaacggcccgacgcagaatacgcgagcgctccatagcggtcatcgccgcccagattttttgcccctgttgggcactcttcacggcgcgatcgacatcctcacgcccggcggcctgcacggtcgccagcacgttaccgttggccgggttaatggtctcgaaggtgcgaccgctggtggcggaggtataaccaccatgtatataaagctgctgttctgccattcgggacatcacgtctcctcggttaatcggtgggtaaatgctgagtaataaagtgacgggtcagcgagtgtgcgagaggtttatccagcggtttgccgcttagtgccgcgcgcagccataatccgtcaatcagcgcggcaaggccgtagcccgcttcctgtgcctgttcgcgcggcaattcgcggcgaaactcgctcaccagattcgacagcaagcggcggctgctgacctgctgtaaacgatagagcatcggctgatgcatactgctggcccagaacgccagccaggctttcatcgccgcactgctcacctgagtttcatcgaagtttccggcaacaatcgcctgtaatcgctgctctgcactgccctgcggaagtgcatgtaatcgattcaaaaccgcgtcacgcagctgactggtgatatcgcgcatggttgcttccagcagaccatttttgtccctgaaatagtggctgatgatccccgtagaaacgcctgcacggcgggcgatctgcgcgatcgttgcatcgtgcatgcccacttcatttattgcttccagtgtggcgtcgatcagttgtctgcgccggatcgactgcatccccaatttgggcattttcgccactccattcatcagcgttgtttatctattaaagcggttattgattggacgttcaatataaaatgtgtcgtaattgttacgaatttgattttaaatggtaacaataacagtggggatactggatgacagaccttttccctgacaacgatcctgtttcgcgacttctcggccctgtggattggccgcacgctggactgggtttctaaaaccttcggttggtactatctactggcggcaacgctctatattgtctttgtggtctgtatcgcttgttcgcgttttggttcggtgaagctcgggccagaacaatccaaaccggaattcagcctgctgagttgggcggcgatgctgtttgctggcgggatcggtatcgacctgatgttcttctccgtagccgaaccggtaacgcagtatatgcagccgccggaaggcgcgggacagacgattgaggccgcgcgtcaggcgatggtctggacgctgtttcactacggcttaaccggctggtcgatgtatgcgctgatgggcatggcgctcggatactttagctatcgttataatttgccgctcaccatccgctcggcgctgtacccgatcttcggtaaacggattaacgggccgataggtcactcagtggatattgcagcggtgatcggcactatcttcggtattgccactacgctcggtatcggtgtggtgcagcttaactatggcttgagcgtactgtttgatattcccgattcgatggcggcaaaagcggcactgatcgccttgtcggtgataatcgccacgatctctgtcacctccggtgtcgataagggcattcgtgtgttatcggaacttaacgttgcgctggcgctgggattgatcctgttcgtattgtttatgggcgacacctcgttcctgcttaatgcgctggtgctgaacgttggcgactatgtgaatcgctttatgggcatgacgctcaacagttttgccttcgaccgtccggttgagtggatgaataactggacgctcttcttctgggcatggtgggtggcatggtcgccgtttgtcggcttgttcctggcgcgtatctcgcgtgggcgtaccattcgccagttcgtgctgggcacgttgattattccgtttaccttcacgctgttatggctctcggtattcggcaatagcgcgctgtatgaaatcatccacggcggcgcggcatttgccgaggaagcgatggtccatccggagcgcggcttctacagcctgctggcgcagtatccggcgtttacctttagcgcctccgtcgccaccattactggcctgctgttttatgtgacctcggcggactccggtgcgctggtgctggggaatttcacctcgcagcttaaagatatcaacagcgacgcccccggctggctgcgcgtcttctggtcggtggcgattggtctgctgacgctcggcatgctgatgaccaacgggatatccgcgctgcaaaacaccacggtaatcatggggctgccgttcagctttgtgattttcttcgtgatggcggggttgtataaatctctgaaggtagaagattaccgccgtgaaagtgtcaaccgcgataccgcgccgcgaccgctggggcttcaggatcgcctgagctggaaaaaacgtctatcgcgcctgatgaattatccgggcacgcgttacactaaacagatgatggagacggtctgttacccggcaatggaagaagtggcgcaggagctgcggttgcgcggcgcgtacgtggagctaaaaagcctgccgccggaagagggacaacagttggggcatctggatttgttggtgcatatgggcgaagagcaaaactttgtctatcagatttggccgcagcaatattcggtgccgggctttacctaccgcgcacgtatcggtaaatcgacctactaccgactggaaaccttcctgttagaaggcagccagggcaacgacctgatggactacagcaaagagcaggtgatcaccgatattcttgaccagtacgagcggcaccttaactttattcatctccatcgtgaagcgccgggccatagcgtgatgttcccggacgcgtgattgtttttgcataaaaccgcgccatgtctgcatatggcgcgggaatcattgactcgctgggtaatgactccaacttattgatagtgttttatgttcagataatgcccgatgactttgtcatgcagctccaccgattttgagaacgacagcgacttccgtcccagccgtgccaggtgctgcctcagattcaggttatgccgctcaattcgctgcgtatatcgcttgctgattacgtgcagctttcccttcaggcgggattcatacagcggccagccatccgtcatccatatcaccacgtcaaagggtgacagcaggctcataagacgccccagcgtcgccatagtgcgttcaccgaatacgtgcgcaacaaccgtcttccggagactgtcatacgcgtaaaacagccagcgctggcgcgatttagccccgacatagccccactgttcgtccatttccgcgcagacgatgacgtcactgcccggctgtatgcgcgaggttaccgactgcggcctgagttttttaagtgacgtaaaatcgtgttgaggccaacgcccataatgcgtgcagttgcccggcatccaacgccattcatggccatatcaatgattttctggtgcgtaccgggttgagaagcggtgtaagtgaactgcagttgccatgttttacggcagtgagagcagagatagcgctgatgtccggcagtgcttttgccgttacgcaccaccccgtcagtagctgaacaggagggacagctgatagaaacagaagccactggagcacctcaaaaacaccatcatacactaaatcagtaagttggcagcatcaccggtacggggttcctgaatgtctccaatgctggcagcgagttatatgctgatgatttgtatgagtcaaactcaggcatgagacacgatcgcggctattttaatgtctccaacggcggcaaaatccatgttaagggcaccagccgtctgacctatttgcagggaaatgtcagtggtgaaggcagccaggtaaattctaaaaccttctttatgggcgtttacggcagttacggtggtaatcagtacctgtcagttaataacggcggtgaagttaatgccagtgagaaaattagcctgggttattatgatcaaaactccgatacaacacttgctgtttcggaaggtggtaaaatctctgcgccgactattagtttaagcaccaactctgagttagcgttaggtgcacaggaaggaagcgcagcgaaggctgcagggattattgatgccgaaaaaattgagtttgtgtgggcaaagacatccgagaagaaaatcaccttaaaccacacggataaaaacgcgactatttccgcggatattgtcagtgacagcgagggcctgggctatatcaatgcgctcaatggtacgacttacttaaccggggataactccgcctttagcggtaaagtcaaaattgagcaaaatggcgctttagggatcacccaaaatataggtaccgcagaaatcaacaaccgcgggaaattacacctgaaggctgacgatagcatgacctttgccaataagatttccggcaacggtacaataagtatcgacagtgggacagtggcgctgaccggcaataactatgcattcagcggatatattgatgtcgcttctggtgctgtcgcggttatttctgaagacaagaacatcggccgtgcggacctggatgttgatggcaaactgcaaatcaatgccaataaagattgggtatttgataacgatcttcaaggtagaggtattgttgaaataaacatggggaatcacgaattctccttcgatgagtttgcttatacagactggttccagggttcactggcgttccagaacacgacatttaacctggaaaagaatgctgagtttctgcagagaggcgggatcactgcgggtcagggaagcctggtaacagtgggtaagggcgctcactccattagcactttgggattctccggcggaaccgttgattttggtgccctgacagcaggtgcacagatgacagaagggacggtcaacgttagtaaaacgctggatttgcgcggcgagggtgtgattcaggtttctgacagtgacgttgtccgctcagtatctcgtgatattgactctgcgttatcgctcactgaagtcgatgatggtaacagcgccattaagctggttgatgcgcaaggtgcggaagttctgggcgatgcgggcaatctgcaattgcaggataaaaatgggcaaatcctctccagcagtgcccaacgtgatattcagcagaatgggcaaaaagcggccgtcggcacttacgactatcgtctgacgagtggggtaaacaatgacggtctgtatatcggttacggcctgacccagcttgatttacacgctaccgacagcgatgctctggtgctgagctctaacggtaaaagcgagaatgccgccgatctcagcgcaaagattaccggcagtggtgacctggcattcagcagccagaagggtcagaccgtatcgctttctaacaaagacaacgactataccggtgttaccgatctgcgcagtgggacgcttttgttgaataacgataacgtgttgggtaatacccatgaactgcgtctggcggcagagactgaactggatatgaatggtcacagccagaccgtgggcacgctcaatggcagcgccgattcactgctgagcttaaatggcggcagtctgacggttaccaacgggggcacttcaaccggttcgttaacggggagcggagagctgaatattcagggcggcacgctggacatcgcgggcgataacagcaacctgacagcgaatgtgaacattgctaattcggctaatgtcctggtaagtcatgcgcagggattgggtagcgcaaacgttgagaacaacggtaccctggcgttgaataatagcgctgaaaaaagagcggctgcgtctgtgaattacaccctgggcggcaatctgaccaacaacggtacgctgatgaccggaatgtcaggacagcaagctggcaatgtgttagtggtgaaggggaactaccacggtaataacggtcaactagtaatgaatacggtactgaatggcgatgactcagtaaccgataaattggttgtcgagggcgatactagcggcacgactgccgttacggtgaataacgctggcggtacaggtgcgaaaacccttaacggtatcgaacttatccatgtagacggtaagtctgagggcgaatttgttcaggctggtcgtatcgttgcgggggcgtatgactacactctcgcgcgtggacaaggggcaaatagtggtaactggtatctgaccagcggcagtgattctcctgaactgcagccggagccagacccgatgccgaatccggagccaaacccgaatccagagccgaaccctaacccgacacctacgccgggtccggatctgaatgtggataatgacctgcgaccggaggcgggtagctacattgcgaaccttgcagcagcgaatacaatgttcaccacgcgtctgcatgagcgtctgggtaatacgtactataccgacatggtgacgggtgagcagaaacaaaccactatgtggatgcgccatgaaggtggtcataataaatggcgtgatggcagcggccagctgaaaacccaaagcaatcgctatgttctgcaactgggaggcgatgtcgcgcagtggagccaaaacggcagcgacagctggcatgttggggtcatggcgggatatggcaacagcgacagcaaaaccatttcctcgcgaaccggttatcgtgcaaaagcgagtgtgaacggatatagcaccggcctctatgccacctggtatgccgatgacgagtcgcgtaatggcgcgtatctcgacagttgggcgcagtacagctggtttgataacacagtgaaaggggatgacttacaaagtgaatcctataaatcaaaaggatttaccgcttcactggaagctggatacaaacacaaattagctgaatttaatggcagccagggaacgcgtaatgaatggtatgttcagccgcaagcacaggttacctggatgggagtcaaagccgataagcaccgcgaaagcaacggaaccctcgttcatagcaacggtgatggcaatgttcaaacccgacttggcgtaaaaacctggctgaagagccaccataaaatggatgacggtaaatcccgcgagttccagccgtttgtagaagtgaactggctgcataacagtaaggatttcagcaccagtatggatggcgtgtccgtcactcaggatggagcccgaaatattgctgagataaaaaccggggtggaaggacagctaaatgccaacctgaatgtctgggggaatgtgggcgttcaggttgccgataggggatataatgacacctctgcaatggttggcattaagtggcaattctgatctgaataatgagtaaaaggagagagagccgaacgggagataattcggctctctgtgtcattttcttgcagccagctttatcagtcagagtgaagactcgcagatttagctggcgcacaagatttaatcaaggtgtgttcaatggcttcgcatgatttgagtgtttttttggaagagttcggggcaacggtgaatttgacgttgcctggtatcgtgtccgaaaaagaacggcttttactcaagctgctaatggagggaatgtcggttacagaaatctcacagtacagaaatcgcagtgcaaagacaatttcacatcaaaagaagcagctgtatgaaaaactaggcatccagagtgatattaccttctggcgggatatcttttttcaatatcatccgcaagtcatcagtggcacgggaaataaaaataatttttatatccctgataaccgttgtcaccatatcgtcacgcctgaagccatcagtctggcgttggaaaaccacgaattcaaaccgtggatccaaccggttttctgcgcgcagactggggtactgacgggctgtgaggtacttgtccgctgggaacatccacaaacgggaattatcccaccggatcagtttattcctctggcggagtcatccggtcttattgtcataatgacccgccaactgatgaaacagactgcggatattctgatgccggtaaaacatttgctgccggacaatttccatattggcatcaacgtctcggcgggttgttttttggcagcgggatttgaaaaagagtgtctgaacctggttaagaaattaggtaacgataaaatcaagctggttctcgagctaacggaacgtaaccctattccggtaacgccagaagccagagcgatatttgacagccttcatcagcacaacattacctttgcgctggatgactttggtacgggttatgcgacctatcgttacttgcaggcgttcccggtcgattttattaagatcgataagtcatttgtgcaaatggcgagtgtcgacgaaatctccggtcatattgtggacaatattgtcgaactagcgcgtaagcctggtctgagtatcgtggcggaaggggtagaaacccaggagcaggcggatttaatgatcggtaaaggcgttcactttttgcagggctatttgtactctccgccagtaccgggtaataaatttatctctgaatgggtaatgaaagcaggtggttgatgtaaaccgctattcacagcgcatcgggaggttggcagcgattaattctcccgatgcagtaaatcctgatagatccccgttaatatgccatttggcgcaaattgttttttaatccactgcgtcacctgacccgtagcagaatgctgagtcgccagtaacatgcgcgaatcctggcgcggattatggatttgtcgggtaaccagcagggattgcgtcatcgcctcacggaccatgtaatccggcaaaaaaccaattccttcacctaaaatctggcactgacatttggtgttgaaatctggcaccagaattgactcctgcccgtgcagcaaccagcccacttttttattaatcgtatgcgcggtgtcctccaccataatattagggtagagacgcagttggctttcggcgatgggttccggcacaaaggctaacgggtgatccggggcgatagcaaaagcccagcgaatcgcgccaatttcagtgtaatcaataccgccgccgtccagtagtgtatcgggtgcgccgatggcgatattggcctgattattaataatcgcatcccagacgccgttatacacttcggtggtgacggtaatctggcaggtaggaaactgctttttcagcacctgtaacaagcgtgcggtgtgtttgggcgtataaagcagctgattaatacaaatgcgcacacgcgcttctatgccctgcgaaatagtatcgatactgcgtttgatggcataaaaatcattcagcaggtcggtagctttgcggaaaaaataacgcccggactccgttaactcaatgctgcgggtactgcgagtgaacagcaccacatccagccccgtctccatacgcttgatggtgtagctaatggcggaagtggttaaacccaactcttctgcggctttactgaagctgccaaaacgcgcagcggtagtaaatgccaacagattctcttcggtaaaaattgagttcattaaaccattctcgccattatctactatgaatttctccagctatgactgtagaggtatcggttaaagatagataatcatttttgaataacttttaatacccgtcgcgtttagtcgtcgcttcgcttaatttttgtccaccatattctgaaattatccccacgcagttacccgccagaaaacccagtaacgtcaccgtccagttcatcccgctggcaaaaaacagcgtcatgccgagaaagccaccgggaataaaggacagtaaccagaaacgcccttgccagaccactaccgccgagaagggtacggtagtaattacgctcgcccagaacgcggacagtccacttacagaggccagccaaccagcagtcagcgcggcgaaaaacgcccacaccatcccggaataattaaccgccagacttctgataaaccccgatttaccgccgcctgcggcataaaaactgcaaaaggcgacgaagccaatggttcctaataattcccatccttgagagagcccgacatgtgaagacactaactgccaaagccctgcacaaataccgacggtgacacccgttgccgtgagtccgttcatcttgttcccctctggttagacatggacgaaagctactcttacatgtgcagactatagagaaataaaacctgattgagtgaaagggtatcgggtcaaagaaacaaatattgcactaccgcacactgcgaaaagattgttgaatattattcaacaaaaaggcgagatacggcgaattaaatttaagcgggttcttttatcagattatcgttgctattctcaattcatcgaaaacagccacaaaaaccaggggaatgtgaatgagtataaaaaatctacctgccgactatttattggctgcacaacagggtgatatcgataaagtaaaaacctgccttgcgctgggtgtcgatattaatacctgcgatcgtcaggggaaaacggcaattacgctggcaagtttatatcagcaatatgcttgcgttcaggcattaattgatgccggagcggatattaataagcaagatcatacctgtttaaatccttttttaattagctgtctgaacgatgatttaacgctactacgaattattttaccggctaaacccgatcttaattgcgtaacccgttttggcggtgtcggcctgacgcctgcctgtgaaaaaggccatttaagtattgtaaaagagcttttggcgcatacggagattaacgttaaccagaccaaccatgtaggctggacgccgctactggaagcgattgtgcttaatgatggtggtattaaacagcaggcgattgtgcagttattgctggaacacggtgccagcccgcatctgaccgataaatatggcaaaacgccactggaactggcgcgggaacggggctttgaagagattgcgcagttactgattgccgcaggtgcataaaccgggaggctggctatcaacacaccagaaaaacggtgtgtgtgggcgctaactgcggatgcggattttctggcgcagcgggggcaaggacaggttgaacaggtctttgccagagcggtaaatatcgcactcccggctcgccagcagttgctgacgctgctttgtgaagagtacgacaatgcgccaaacagttgtcggttggcactcactcactttgatgatctgttccggcatggtgataaggttcagtttgacgatcaaggtattacggttggtcaacatcttcatatagagatgagtcgttgtcggcgttggctgtccccaaccttgcaaatgaccgctgtgaattttcaccttatcgcctggctacagtggcacgacattattcatcagcacctgggggaaaatgaaaccctgtttaattatcgcggcgataatccgttttatcaggcgttaaataaagaattacatattaaacgacgggcagttattcagacagtaaacgataagcaaaatatcgccgcagcggtcgccagtatgattgggttagggattggccttacgccatcagccgatgattatttaacaggtctggcgcttattttatttattcccgggcatccggcagaaaaatacaaagaggaattttatcgcggtctgctacgcggcagaaataacaccacgttattaagtgccataacgctggaagccgcattacaacaacgctgccgggaaaatattcatcgctttattcacaacattatttatggcgtccctgggaattcaactcaggcaatagaaaaaattaaacatattggctccagttccggctgcgacatgctgtatggcatggccgatggttgtgcgctgagccaaacctacggagggaattatgtcagttaaaatagtcattaaaccgaatacctattttgattctgtctcgctgatgtctatctccacgcgtgcaaataaactcgacggcgtcgagcaggcatttgtggcgatggcgaccgaaatgaacaaaggtgtgctgaaaaatttaggactgctgacgccgacgctggaacaggcgaaaaacggcgacctgatgattgtcatcaatggtaaatcgggtgcggacaacgagcagttgctggtggagattgaagaactgttcaacaccaaagcgcaaagcggctcgcacgaggcgcgttacgccactattgccagcgccaaaaagcatatcccggaaagtaacctggcggtgatttcggtcaacggtctgtttgccgctcgcgaagcgcgtcaggcgctgcaaaacgatctcaacgtgatgctgttttccgataacgtctcagttgaagatgaactggcgctcaagcagttggcccacgaaaaagggctgctgatgatggggccggactgcggcacggcgattattaacggcgcggcgctctgttttggtaacgccgtgcgtcgcggcaatatcggtattgttggcgcatccggcaccggcagccaggagctgagcgtccgcattcatgaatttggtggcggtgtttcacaactgattggcaccggcgggcgcgacctgagcgagaaaatcggcggcctgatgatgctcgacgccatcgggatgctggaaaacgatccgcaaactgaaattatcgcactgatttcaaaacctcccgcgcctgcggtggcccgcaaagtgctggaacgcgcacgtgcctgccgcaagccggtggtggtctgcttcctcggtcgcgttgaaacgccggtggatgagcaggggctacagtttgcccgcggcagcaaagaggcggcgctaaaagcggtgatgctctccggcgtgaaacaggaaaatctcgacctgcatacgcttaaccagccgttgattgctgatgtgcgtgcgcgtctgcaaccgcagcagaaatacattcgtggcctgttctgcggcggcacgctgtgcgacgaaaccatgttcgcggtgatggaaaaacatggcgatgtctacagcaacattcagcccgatccggaattccgcctgcaagatatcaaccgcagcatcaaacacaccttcctcgactttggcgatgacgacttcacgaacggcaagccgcatccaatgattgaccccaccaaccgcatcagtcgcttgatcgaagaggcgcgcgatccagaagtggcggtgatcgtgatggattttgtgctcggatttggatcgcatgaagatccggtcggctccaccatcgaggcgatcaaagaagcgaaagcgatcgccgctgccgaaggacgcgagttgatcattctcgcctatgtgctgggtaccgatcttgatacgccatcgttagaacaacaaagccagatgctgcttgatgccggagtgattctggcgagcagcagcaccaataccggattgctggcgcgtgaatttatctgcaaaggggaggaagcctgatgagccagtcactgtttagccaaccattgaacgttattaacgtcggcatcgccatgtttagcgatgacctgaaaaagcagcatgtagaagtgactcaactcgactggacgccgccggggcagggcaatatgcaggtggtgcaggcgctggataacattgccgattcgccgctggcagacaaaatcgccgccgctaaccagcaggcgctggagcgcattatccagtcgcatccggtgctgattggttttgatcaggcgattaacgtggtgccgggcatgacgccgaaaaccattcttcacgccgggccgccgatcacctgggaaaaaatgtgcggcgcgatgaaaggcgcggtcaccggagcgctggtgttcgaaggactggcgaaagatctcgacgaggcggctgaactggcggcctccggggagatcaccttctcgccgtgccacgaacacgactgtgtgggatcgatggcgggcgttacctcggcctcgatgtttatgcacatcgtgaaaaacaaaacctacggcaacatcgcttacaccaatatgagcgagcagatggcgaagattttgcgtatgggtgccaacgatcagagcgtgatcgaccgcctcaactggatgcgcgatgtgcaggggccaatgctgcgcgacgcgatgaaaattatcggtgagatcgatctgcgcttaatgctggcgcaggcgctgcatatgggcgatgagtgccataaccgcaataacgccgggacgacgctgctgattcaggcactgacgccggggatcattcaggcaggctattccgtcgagcaacagcgcgaagtgttcgagtttgtcgccagcagcgactacttctccggcccgacgtggatggcgatgtgtaaagcggcgatggatgcggcgcacggcatcgaatacagcaccgtggtcaccaccatggcgcgtaacggcgtcgagttcggcctgcgggtcagcggcctgccggggcaatggtttaccggcccggcgcagcaggtgatcggcccgatgtttgccggttataagccggaagattcggggctggatatcggcgacagcgccatcaccgaaacctacggtattggtggatttgctatggcgaccgcgcctgcaatcgtcgcgctggtgggcggcacggtggaagaggctatcgatttctcccgtcagatgcgtgaaatcactctcggtgaaaaccccaacgtcaccattccgctgctcggttttatgggcgtgccgtcggcaatcgacatcacccgcgtgggtagcagcggcattctgccggtgatcaacaccgccatcgcccataaagatgcgggcgtcggcatgattggcgcgggcattgtgcatccaccattcgcttgcttcgagaaagccattctcggctggtgcgaacgttacggcgtctgacttacatgtttatgccggatgcggcgtgaacgccttatccggcctacggatggcccgagaattgtaggcctgataagcgtagcgcatcaggcagtctggcgttggtcataacctcatcaccctctgtagcggacataacaacatgaaagagcttgtggtcgttgccattggtggcaacagcattatcaaagataacgccagccagtcgattgagcatcaggcggaggcggtgaaagccgtggccgatacggtgctggaaatgctggcttccgattacgacattgtgctgacccacggtaacgggccgcaggtcgggctggatttacgccgtgcggagattgcccacgagcgcgaagggctgcccttaacgccgctggcgaactgtgtggcagatacgcagggcggcatcggctatctgatccaacaggcgctgaataaccgactggcgcgtcacggcgagaaaaaagccgtcaccgtggtaactcaggtggaagtggataaaaacgatccaggttttgcccatcccaccaagcccattggtgcattcttcagtgaaagccagcgtgacaaactacaaaaggcaaaccctgactggtgttttgttgaagatgccggacggggctatcgtcgcgtggtcgcctcgccggaaccgaaacgtattgtcgaagcacccgccattaaggcgctgatccaacaaggttttgtcgtaattggcgcgggcggcggtggaattccggtagtgcgtactgaagcgggggattaccaaagcgtggacgcggttattgacaaagatctctctaccgcgctgctggcccgtgaaattcacgccgacattctggtgatcaccaccgacgtcgaaaaagtctgtatccactttggtaaaccgcagcagcaggcgctggatcgggtggatattgccaccatgactcgctatatgcaggaagggcatttttctcccggcagcatgttgccaaaaatcatcgccagcctgacgttcctggagcagggcggcaaagaagtgattatcaccacgccggaatgcctgcctgcggcgctgcgcggtgaaacgggcacccatattattaaaacgtaaggacgtaggatgaaagaaagcaatagccgccgtgaatttctgagccagagcggtaagatggtcaccgccgccgcgctgtttggtacctatgtgccgctcgcccatgcggcggtagctggcaccctaaactgcgaagcgaacaacaccatgaaaatcactgacccgcattactatctcgataacgtgctgctggaaaccggttttgactacgaaaacggtgtggcggtgcagacccgcacggcgcgccagaccgtggagattcaggacggcaaaattgtcgccctgcgcgagaacaagcagcatccggacgccacgctgccgcactatgacgctggcggtaagttgatgctacccaccactcgcgacatgcatattcatctcgacaaaaccttctacggcgggccgtggcgctcgctcaatcgtccggcaggcaccactatccaggacatgatcaaactcaagcagaaaatgctgccggagttacaaccgtatacgcaggagcgggcggaaaaactgatcgatctattgcagtcgaaaggcaccaccattgcccgcagccactgcaatatcgaaccggtttccggcctaaaaaatctgcaaaatttgcaggcggtgctggcgcggcgtcaggcgggcttcgagtgtgaaatcgtcgccttcccgcagcacggtttgctgctgtcgaaatcggaacccttaatgcgcgaagcgatgcaggcgggtgcgcattacgtcggcgggctggacccgaccagtgtcgatggcgcgatggaaaaatccctcgacaccatgtttcagattgcgctggactacgacaaaggtgtcgatattcacctgcacgaaaccactccgtcgggcgtggcagccatcaattatatggttgaaacggtagagaaaacgccgcaactgaaaggtaagctgaccatcagccacgcctttgcgctggctacgctcaacgaacaacaggtcgatgcgctggcgaatcggatggcggcgcagcaaatttctatcgcctcgacggtgccgattggcacgctgcatatgccgctcaaacagttgcacgacaaaggcgtaaaagtgatgactggcactgacagcgttatcgaccactggtcgccttatggtctgggcgacatgctggaaaaagccaatctctacgcgcagctctatattcgtcctaacgaacagaacctctcccgttcgctgtttctagccactggcgatgtattgccgctgaatgaaaaaggcgagcgtgtatggccaaaagcgcaggatgatgccagctttgtgctggtggacgcctcctgttccgccgaggcggtggcgcgtatctcgccgagaaccgcaacgttccataaagggcaactggtgtgggggagtgtggcaggttgatgcgcatttgaaacgcctgcaacggtgaattgtaagagatttaagccccagggagtggggcgacctcaatatgatagtgtcggcagaaatggacattatctttgaggaatatgcccttattgacgttgtgtagataactatttgtctacgtgaaaagatcatcagttttgccgattttagtcttttacggatagcaaatatcacacttataggcgctcgccttatggggaacgttgctgctctgtttcattcaggttcgcggcatgttggggctggatcgggtggtttaaatattggctatattcaatggacgcgttttgccgcgatgacatatcaggcgtcgccaaatacacatagctaatcaggagtaaacacaatgaagatcaaagctgttggtgcatattccgctaaacaaccacttgaaccgatggatatcacacggcgtgaaccgggaccgaatgatgtcaaaatcgaaatcgcttactgtggcgtctgccattccgatctccaccaggtccgttccgagtgggcggggacggtttacccctgcgtaccgggtcatgaaattgtggggcgtgtggtagccgttggtgatcaggtagaaaaacatgcgccgggcgatctggtcggtgtcggctgcattgtcgacagttgtaaacattgcgaagagtgtgaggacgggctggaaaactactgtgatcacatgatcggcacctataactcgccgacgccggacgaaccgggccatactctgggcggctactcacaacagatcgtcgttcatgagcgatatgttctgcgtattcgtcacccgcaagagcagctggcggcggtggctcctttgttgtgtgcagggatcaccacgtactcgccgctacgtcactggcaggccgggccgggtaaaaaagtgggcgtggtcggcatcggcggtctgggacatatggggattaagctggcccacgcgatgggggcacatgtggtggcatttaccacttctgaggcaaaacgcgaagcggaaaaagccctgggggccgatgaagttgttaactcacgcaatgccgatgagatggcggctcatctgaagagtttcgatttcattttgaatacagtagctgcgccacataatctcgacgattttaccaccttgctgaagcgtgatggcaccatgacgctggttggtgcgcctgcgacaccgcataaatcgccggaagttttcaacctgatcatgaaacgccgtgcgatagccgattctatgattggcggcattccagaaactcaggagatgctcgatttttgcgccgaacatggcatcgtggctgatatagagatgattcgggccgatcaaattaatgaagcctatgagcgaatgctgcgtggtgatgtgaaatatcgttttgttatcgataatcgcacactaacagattgaaaaaattaataaatacgctgtggtttaacatattaacttcgctctccacttaactttttagttaaggagagcgaaataatatcaaagtagcagtaaaacctataacgtaaattcaaattgttaaattaactccctccagtacacaatacttctcacgttagttatgagcgatttctgatagtgcctggtttaatcagcgctttattatctgcgacgtttatttttatttaagagagatcgcgatgatatcattaaaagctccgcacaataatttgatgccatatacgcaacaaagcatacttaatacggttaaaaacaatcagttaccagaggatatcaaaagctccctggtttcctgtgtcgatatattcaaggttttgattaaacaatattatgattatccttatgattgtcgtgatgatttagtcgatgacgacaaactcattcatctcatggctgccgtacgagactgtgagtggtcagacgataacgcactcaccataaatgtgcagtttaatgatttcccaggattttatgactggatggattaccctgatcacccggttaagtttgtttttcgcatacttgaaaatcaaaaagggacagtttgggtatatgaccaggatgatgcgtttcttgatattaaagcaaatgtgcaggctggacgctttaccgggcttaagaaattagtgcagtttatcaattcagtgcgaacagattgcaaatgtattcttcttgaacaccatatgcctttgctgagacttttccctaaagggaaagagtgtatgcatgtggaaaaatggcttcgcgaaatgtcgtctattccggagacagacgcgcccattaagcaggcgcttgcgcatggattattattacacttaaaaaatatctaccctgtttttcctgaatcactggtgatgttattgctctctgttctggacgtaaaaacatacagagatgatgcacgattaaatgaatggatatctaatagagtgcaggaattaggtgacagatattatcctgtaaataagcacgttaaaatccgctacactctttagttcagaaagggttccacctgcaagttgttattccaccagagagtgaatcgcaaagcaggtaatcatttcatctgtatatccgtatgccaaatggcattccaccgccttttcgccgatattttgttgtgatcggcgacacttcgcttaaaaaagcaccagcagtggtgaggtgtactggcaatagcggacactaccatttgttctttttttaagcagccatctgatgatatttttccctgaaggctgccggggagatattccccagacgagagtgacgacgctgacgattgtagaaaatctcaatgtattcccgtattactgagatggcttcatcccggttattaaaacgatagtggctcaggctctcatttttcagcgttccccagaagctttccatcggagcgttgtcgtaacagttacctttacgcgacattgatgttttcagaccagactgctcctgtatgacccggtaatcgtatgcgcagtactgtgaacctcgatcagagtggtggattagcccggcaggtgggcgctggctcctgagcgccataaacagggctttacctgtcagctcttttgtcatgcgctctcccatggcgtagccgacaatttcgcacgtataaacatctttgatgccagcgaggtacaaccatccctcctgtgtggcaacatacgtcaggtccgccacccagacctgatttggtgctgtaggagtgaacgtctggttcagcagatttggcgcaactggcagattgtggttcgagttcgtagtcgctctgaacttgcgtttctgcttacagcgtagccttagctccttacgaagacgtgccagtcggtcacgaccaacgatgatgccattctctgccagctccgtctggagccgccgggttccatatgtttcgcgagtgcggatatgtgccaccttaatctccagttttagccgctcatcactttgttttctgtctgagggttcatgctgtacccagttgtaataaccgctcctggatacaccaaatacctgacacatcgcttcaatgggaaattgttgtcgccattgttcgattaacgcgtatttttcagcgactcctgtgcaaaatacgctgttgctttttttaatatatctcgctcaaggcgagcttcatttaacgccttacgcagttgcagaatttcagattccagttcagccaccgtgcgggaaccaggagtaccgagcccttttctggcggcggtaacccattgtcctaaagtgccttcaggaagagataatcgggaagcgccttcactgatcgaaagttgattttcaagaaccgttctgacagcttcggctttgaactctttagagtaacgttgggtttttctgctcattattagctccttctgatgccattctatttcaggaaggagtgtccgttaaactcaggctacctcagtggtttcgcagccatgcggtgtataaaaaatgatctcatgcagatgttttgtgaatgtgtgggttgacattcatatgaaaaaaatcataattccatcatgtttgtgtggggtcttttctgtaccttacgcatcgcactcaagcctgacagaaaatatgctgtaaggctcatatcaaaaaccgccattagctcatcaggaagagcagacgacaaccaggattgttgtatggtacggggttcgaggcctcgatggcggtccaacttttcaaaactcttctgaatcagatccccttattatcatccctgcaaagtggaacattgccattgtttggctattcaggacgggtcagaccaatgaaaaaagcccacacaggggagagtgggctgaaatgggaagctaaagactcaagtaaacttatcggaaataaggaccacgcattacgggggctatcatcgccgatagtcgggattcggcaaatcaggttgattacgtagagagtaaattatctgctcaccgctgcgtcaccccttcgtaaatcaggcgtagcgcgaatacaccaataattgcaccaataacccgactggcaacgcgttgcatacgcccataagcacgacgcacagcgggcaaagaaaacgcctgactaagaaagactcgccagataactgatgcgagcacaatccccgcccaggccattaaacgtgcccatgttggtgtttcggcatttaatgttactgagaaaatactgataaaaaataaaacggtttgcgggttagagagatcggtaattaatccgcggcgaaaaaagacataccaggaggcgctaatcggttgttgtagtgtgctcatttgcggtgttgactggcggcgcatgctgcaccacgcaaaccataagagataagcgccgccgacgattctgataagcgaaaaaatctcctcacactgcgttattagcgttgcaagaccaaacaaacccaacccggaataaaatgcatcgcccagcgccacgcccagtccggtcagcacccctgcgcgtcgaccggaagccaggctggtttgtactaccacaaagagattggctcccggattaaaaaaagtaatcacgaacagtcctacggtcaggtaaacggcgtgcaaaggatccatagtgatttcatccataaataagtgggtaatgactccaacttattgatagtgttttatgttcagataatgcccgatgactttgtcatgcagctccaccgattttgagaacgacagcgacttccgtcccagccgtgccaggtgctgcctcagattcaggttatgccgctcaattcgctgcgtatatcgcttgctgattacgtgcagctttcccttcaggcgggattcatacagcggccagccatccgtcatccatatcaccacgtcaaagggtgacagcaggctcataagacgccccagcgtcgccatagtgcgttcaccgaatacgtgcgcaacaaccgtcttccggagactgtcatacgcgtaaaacagccagcgctggcgcgatttagccccgacatagccccactgttcgtccatttccgtgcagacgatgacgtcactgcccggctgtatgcgcgaggttaccgactgcggcctgagttttttaagtgacgtaaaatcgtgttgaggccaacgcccataatgcgtgcagttgcccggcatccaacgccattcatggccatatcaatgattttctggtgcgtaccgggttgagaagcggtgtaagtgaactgcagttgccatgttttacggcagtgagagcagagatagcgctgatgtccggcagtgcttttgccgttacgcaccaccccgtcagtagctgaacaggagggacagctgatagaaacagaagccactggagcacctcaaaaacaccatcatacactaaatcagtaagttggcagcatcaccgaacggcgcaaacatcactaacatgccggtaataatccacagcaggtatttgcgcagcccgagtttgtcagaaagcagaccaaacagcggttggaataatagcgagaacagagaaatagcggcaaaaataatacccgtatcacttttgctgatatggttgatgtcatgtagccaaatcgggaaaaacgggaagtaggcccccatgataaaaaagtaaaagaaaaagaataaaccgaacatccaaaagtttgtgttttttaaatagtacataatggatttccttacgcgaaatacgggcagacatggcctgcccggttattattatttttgacaccagaccaactggtaatggtagctaccggcgctaagctggaattccgctgaaactgacgggctccaggagtcgtcgccaccaatccccatatggaaaccgtcgatattcagccatgtgccttcttccgcgtgcagcagatggcgatggctggtttccatcagttgttgttggctgtagcgactgatattgaactggaagtcgccgcgccactggtgtgggccataattcaattcgcgcgtcccgcagcgcagaccgttttcgctcgggaagacgtacggggtatacatgtctgacaatggcagatcccagcggtcaaaacaggcggcagtaaggcggtcgggatagttttcttgcggccctaatccgagccagtttacccgttctgctacctgcgccagctggcaggtcaggccaatccgagccggatgcggtgtatcgctcgctacttcaacatcaacggtaatcgccatttgaccactaccatcaatccggtaggttttccggctgataaataaggtttttccctgatgctgccacgcgtgagcggtcgtaatcagcaccgcgtcggcaagtgtatctgccgtgcactgcaacaacgctgcttcggcctggtaatggcccgccgccttccagcgttcgacccaggcgttcgggtcaatgcgggtcgcttcacttacgccaatgtcgttatccagcggtgcacgggtgaactgatcgcgcagcggcgtcagcagttgtttttcagcgccaatccacatctgtgaaagaaagcctgactggcggttaaattgccaacgtttattacccagctcgatgcaaaaatccgtttcgctggtggtcagttgcgggatggcgtggggcgcggcggggagtgtcacgctgaggttttccgccagacgccactgctgccaggcgctgatgtgtccggcttctgaccatgcggtcgcgttcggttgcactacgtgtaccgtaagccagagttgtccggcgctctccggctgcggtagttcaggcagttcaatcaactgtttatcttgtggagcaacatccagaggcatttcaccgcttgccagcggcttgccatccaacgccaccgaccagtgcagaagctcgttatcgctatgacggaacaggtattcgctggtcacttcgatggtttgcccggataaacggaactggaaaaactgctgctggtgttttgcttctgtcagcgctggatgcggcgtgcggtcggcaaagaccagaccgttcatgcagaactggcgatcgttcggtgtatcgccaaaatcaccgccgtaagccgaccacggattgccattttcatcatatttaatcagcgactgatccacccagtcccagacgaagccgccctgtaaacgggggtactgacgaaacgcctgccagtatttagcgaagccgccaagactgttacccatcgcgtgggcgtattcgcaaaggatcagcgggcgcgtctctccaggtagcgaaagccattttttgatggaccatttcggcacagccgggaagggctggtcttcatccacgcgcgcgtacatcgggcaaataatatcggtggccgtggtgtcggctccgccgccttcatactgcaccgggcgggatggatcgacagatttgatccagcgatagagtgcgtcgtgattagcgccgtggcctgactcattccccagcgaccagatgatcacactcgggtgattacgatcgcgctgcaccattcgcgttacgcgttcgctcatcgcgggtaaccagcgcggatcatcggtcagacgattcattggcaccatgccgtgggtttcaatattggcttcatccaccacgtacaagccgaagcggtcgcacagcgtgtaccacagcggatggttcggataatgcgaacaacgcacggcgttaaagttgttctgcttcatcagcaggatatcctgcaccatcgtctgctcatccatgacctgaccatgcagaggatgatgctcgtgacggttaacgccgcgaatcagcaacggcttgccgttcagcagcagcagaccattttcaatccgcacctcgcggaaaccgacatcgcaggcttctgcttcaatcagcgtgccgtcgtcggtgtgcagttcaaccaccgcacgatagagattcgggatttcggcgctccacagcgccgggttttcgacgttcagacgtagcgtgacgcgatcggcataaccaccacgctcatcgataatttcaccgccgaaaggcgcggtgccgctggcgacctgcgtttcaccctgccacaaagaaaccgtcacccgcagctcatcgcgcagctcgccgtacatctgaacttctgcctccagtaccgcgcggctgaaatcatcattaaagtgagtggcaacatggaaatcgctgatttgtgtgctcggtttgtgcagcaacgagacgtcacggaaaatgccgctcattcgccacatatcctgatcttccagataactaccgtcactccagcgcagcaccatcaccgcgaggcggttttttccggcgcgtaaaaatgcgctcaggtcaaattcagacggcaaacggctgtcctggccgtaaccgacccagcgcccgttgcaccacagatgaaacgccgagttaacaccatcaaaaataattcgcgtctggccttcctgtagccagctttcatcaatattaaatgtgagcgagtaacaacccgtcggattctccgcgggaacaaaaggcggattgaccgtaatgggataggtcacgttggtgtagatgggcgcatcgtaaccgtgcatctgccagtttgaggggacgacgacagtatcggcctcaggaagatcgcactccagccagctttccggcaccgcttctggtgccggaaaccaggcaaagcgccattcgccattcaggctgcgcaactgttgggaagggcgatcggtgcgggcctcttcgctattacgccagctggcgaaagggggatgtgctgcaaggcgattaagttgggtaacgccagggttttcccagtcacgacgttgtaaaacgacggccagtgaatccgtaatcatggtcatagctgtttcctgtgtgaaattgttatccgctcacaatttcacacaacatacgagccggaagcataaagtgtaaagcctggggtgcctaatgagtgagctaactcacattaattgcgttgcgctcactgcccgctttccagtcgggaaacctgtcgtgccagctgcattaatgaatcggccaacgcgcggggagaggcggtttgcgtattgggcgccagggtggtttttcttttcaccagtgagacgggcaacagctgattgcccttcaccgcctggccctgagagagttgcagcaagcggtccacgctggtttgccccagcaggcgaaaatcctgtttgatggtggttaacggcgggatataacatgagctgtcttcggtatcgtcgtatcccactaccgagatatccgcaccaacgcgcagcccggactcggtaatggcgcgcattgcgcccagcgccatctgatcgttggcaaccagcatcgcagtgggaacgatgccctcattcagcatttgcatggtttgttgaaaaccggacatggcactccagtcgccttcccgttccgctatcggctgaatttgattgcgagtgagatatttatgccagccagccagacgcagacgcgccgagacagaacttaatgggcccgctaacagcgcgatttgctggtgacccaatgcgaccagatgctccacgcccagtcgcgtaccgtcttcatgggagaaaataatactgttgatgggtgtctggtcagagacatcaagaaataacgccggaacattagtgcaggcagcttccacagcaatggcatcctggtcatccagcggatagttaatgatcagcccactgacgcgttgcgcgagaagattgtgcaccgccgctttacaggcttcgacgccgcttcgttctaccatcgacaccaccacgctggcacccagttgatcggcgcgagatttaatcgccgcgacaatttgcgacggcgcgtgcagggccagactggaggtggcaacgccaatcagcaacgactgtttgcccgccagttgttgtgccacgcggttgggaatgtaattcagctccgccatcgccgcttccactttttcccgcgttttcgcagaaacgtggctggcctggttcaccacgcgagaaacggtctgataagagacaccggcatactctgcgacatcgtatagcgttactggtttcacattcaccaccctgaattgactctcttccgggcgctatcatgccataccacgaaaggttttgcgccattcgatggtgtcaacgtaaatgcacgccgcttcgccgtccggccaccagaatagcctgcgattcaaccccttcttcgatctgttttgctacccgttgtagcgccggaagatgcttttccgctgcctgttcaatggtcattgcgctcgccatatacaccagattcagacagccaatcacccgttgttcactgcgcagcggtacggcgatagaggcgatcttctcctcctgatcccagccgcggtagttctgtccgtaaccctctttgcgcgcgcgcgccagaatggcttgcagctttaacggttctcgtgccagttgatagtcatcaccggggcgggcggctaacatttcgattaattccttgcgttcttgttccgggcaaaaggccagccaggtcaggcccgaggcggttttcaggagcggtaaacgtcgcccgaccattgcccggtgaaaggataagcggctgaaacggtgggtggtttcgcgtaccaccattgcatcaacatccagggtggacacatctgttggtcataccacttcgcgcaacagatcgcccagcagcggggccgccagtgcagaaatccactgttcgtcacgaaatccttcgcttaattgccgcactttgatggtcagacgaaaactgtcatcggaggggctacggcggacatatccctcttcctgcagcgtctccagcagtcgccgcacagtggtgcgatgcaggccgctgagttccgccagcagcccgacgctggcaccgccatcaagtttatttaacatatttaataacattagaccgcgggttaagccgcgcacggttttgtattccgtctgctcattgttctgcatattaattgacatttctatagttaaaacaacgttgtgcagaaatggcaatacaacaccctgacatccagcctgctgttaaccatagcgttcaggtggcgatcgctggtgccggtccggttgggctgatgatggcgaactatctcggtcagatgggcattgacgtgctggtggtggagaaactcgataagttgatcgactacccgcgtgcgattggtattgatgacgaggcgctgcgcaccatgcagtcggtcggcctggtcgagaatgttctgccgcacactacaccgtggcacgcgatgcgttttctcaccccaaaaggccgctgttttgctgatattcagccaatgaccgatgaatttggctggccgcgccgtaacgcctttattcagccacaggtcgatgcggtgatgctggaagggttgtcgcgttttccgaatgtgcgctgcttgttttcccgcgagctggaggccttcagccagcaagatgacgaagtgaccttgcacctgaaaacggcagaagggcagcgggaaacgatcaaagcccagtggctggtggcctgtgatggtggggcaagttttgttcgtcgcaccctgaatgtgccgtttgaaggtaaaactgcgccaaatcagtggattgtggtagatatcgccaacgatccgttaagtacgccgcatatctatttgtgttgcgatccggtgcgcccgtatgtttctgccgcgctgcctcatgcggtacgtcgctttgaatttatggtgatgccgggagaaaccgaagagcagctgcgtgagccgcaaaatatgcgcaagctgttaagcaaagtgctgcctaatccggacaatgttgaattgattcgccagcgtgtctacacccataacgcgcgactggcgcaacgtttccgtattgatcgcgtactgctggcgggcgatgccgcgcacatcatgccggtgtggcaggggcagggctataacagtggtatgcgcgacgcctttaacctcgcctggaaactggcgttggttatccaggggaaagcccgcgatgcgctgctcgatacctatcaacaagaacgtcgcgatcacgccaaagcgatgattgacctgtccgtgacggcgggcaacgtgctggctccgccgaaacgctggcagggtacgttacgtgacggcgtttcctggctgttgaattatctgccgccagtaaaacgctacttcctcgaaatgcgcttcaagccgatgccgcaatattacggcggtgcgctggtgcgtgagggcgaagcgaagcactctccggtcggcaagatgtttattcagccgaaagtcacgctggaaaacggcgacgtgacgctgctcgataacgcgatcggcgcgaacttcgcggtaattggctggggatgcaatccactgtgggggatgagcgacgagcaaatccagcagtggcgcgcgttgggcacacgcttcattcaggtggtgccggaagtgcaaattcataccgcacaggataaccacgacggcgtgctacacgtgggcgatacgcaaggtcgtctgcgtagctggttcgcgcaacacaatgcttcgctggtggtgatgcgcccggatcgctttgttgccgccaccgccattccgcaaaccctgggcaatacgctgaataaactggcgtcggtgatgacgctgacccgccctgatgccgacgtttctgtcgaaaaggtagcctgatatgcacgcttatcttcactgtctttcccactcgccgttggtggggtatgtcgacccggcgcaagaggtactcgatgaggtcaatggcgtgattgccagcgcccgcgagcgtattgcggctttctcccctgaactggtggtgctgtttgcgccagatcactacaacggctttttctatgacgtgatgccaccgttctgtttaggcgttggagcgacggcaattggtgatttcggcagtgcggcaggagagctgcccgtgcctgtggagctggcggaggcctgtgcgcatgctgtcatgaagagcgggatcgatcttgccgtttcttactgtatgcaggtggaccacgggttcgcccagccgctggagttcctgctcggtgggctggataaggtgccagttctgcctgtgttcatcaacggtgtcgccacgccgctgcccggtttccagcgtacccgcatgttgggtgaagccattggacgtttcaccagcactctcaataaacgcgtgctgttcctgggttccggtgggctttcccatcagccgccggtgcccgaactggcgaaagccgatgcccatatgcgcgaccgtctgttggggagcgggaaagatttacccgccagtgagcgcgaattgcgtcagcaaagggtgattagcgccgctgagaagtttgttgaggatcagagaactctgcatccgctcaacccgatttgggataaccagttcatgactttgctggagcagggacgcatacaggaactggatgccgtcagtaacgaagagctttccgccattgccggaaagtcgacacatgaaatcaaaacctgggtcgccgcttttgccgctatttctgcatttggcaactggcgtagcgaagggcgttattaccgcccaatcccggagtggattgccggatttggctcgttaagcgccagaacagagaactgaatatgcaggagaagatgatgagttatcagccacaaaccgaagccgccaccagccgttttctgaatgtagaagaagcgggtaaaacgctgcgcatccattttaatgactgcggacaaggcgacgaaaccgttgtcctgctgcatggttccggcccgggtgctactggctgggcgaacttcagccgcaatatcgatccgctggtagaggcgggctatcgggtgatcctgctggattgtccgggttggggcaaaagcgattcgatcgttaatagtggttcacgatcggatcttaatgcacgaatcctgaaaagcgtggtggatcaactggatatcgccaaaatccacctgctgggcaactcgatgggcggccatagttctgtggcgttcacccttaactggccggagcgcgtcggcaaactggtgctgatgggcggcggtacgggcggcatgagtttgtttacgccgatgccaaccgaaggtattaagcgactgaatcagctttatcgtcagccgactatcgaaaacctgaagctgatgatggatatcttcgttttcgataccagcgatttgaccgacgccctgtttgaagcgcgcctgaataatatgctgtcgcgccgcgatcacctggaaaacttcgttaagagcctggaagctaatccgaaacagttcccggattttggcccacgtctggcggaaatcaaagcgcaaaccctgattgtctgggggcgcaacgaccgctttgtgccgatggatgcgggtctgcgtctgctgtccggcattgccggttctgaactgcatatcttccgcgactgtggtcactgggcgcagtgggaacatgccgacgctttcaatcaattggtgctgaatttcctcgcacgcccttaaggaatggtcatgacgaagcatactcttgagcaactggcggcggatttacgccgcgccgcagagcagggcgaagcgattgcgccgctgcgcgatctgattggtatcgatcacgctgaagcggcctacgccattcagcacataaatgtgcaatatgacgttgtgcaggggcgtcgcgtggtagggcgtaaagtgggcctgacgcatccgaaagtgcaacaacaactgggcgttgatcaaccggattttgggacgttatttgccgacatgtgttatggcgataacgaaatcattcctttttcccgtgttctgcaaccccgcattgaagcggagatcgcactggtgttgaaccgcgatttacccgcaactgatatcaccttcgacgaactgtataacgccattgaatgggtacttccggcgctggaagtggtggggagccgcattcgcgactggtcgattcagtttgtcgataccgtggcagataacgcttcctgcggggtgtatgtcatcggcggtccggcgcaacgtccggcggggttagacctgaaaaactgcgccatgaagatgacgcgtaataacgaagaggtttccagcgggcgcggcagcgaatgcctgggacatccgcttaatgccgccgtctggctggcacgcaaaatggccagtctgggtgaaccgctgcgcgccggagatatcattcttaccggggcattaggcccgatggtggcggtgaatgcgggcgatcgttttgaagcccatattgaaggcataggttcagttgctgcgacattttcaagcgcagccccaaaaggaagtctgtcatgagtaagcgtaaagtcgccattatcggttctggcaacattggcaccgatctgatgattaaaattttgcgtcacggtcagcatctggagatggcggtgatggtcggcattgatcctcagtccgacggtctggcgcgtgccagacgtatgggcgtcgccaccacccatgaaggggtgatcgggctgatgaacatgcctgaatttgctgatatcgacattgtatttgatgcgaccagcgcgggcgcgcatgtgaaaaacgatgccgctttacgcgaagcgaaaccggatattcgcttaattgacctgacgcctgctgccatcggcccttactgcgtgccggtggttaacctcgaggcgaacgtcgatcaactgaacgtcaacatggtcacctgcggcggccaggccaccattccaatggtggcggcagtttcacgcgtggcgcgtgttcattacgccgaaattatcgcttctatcgccagtaaatctgccggacctggcacgcgtgccaatatcgatgaatttacggaaaccacttcccgagccattgaagtggtgggcggcgcggcaaaagggaaggcgattattgtgcttaacccagcagagccaccgttgatgatgcgtgacacggtgtatgtattgagcgacgaagcttcacaagatgatatcgaagcctcaatcaatgaaatggctgaggcggtgcaggcttacgtaccgggttatcgcctgaaacagcgcgtgcagtttgaagttatcccgcaggataaaccggtcaatttaccgggcgtggggcaattctccggactgaaaacagcggtctggctggaagtcgaaggcgcagcgcattatctgcctgcctatgcgggcaacctcgatattatgacttccagtgcgctggcgacagcggaaaaaatggcccagtcactggcgcgcaaggcaggagaagcggcatgaacggtaaaaaactttatatctcggacgtcacattgcgtgacggtatgcacgccattcgtcatcagtattcgctggaaaacgttcgccagattgccaaagcactggacgatgcccgcgtggattcgattgaagtggcccacggcgacggtttgcaaggttccagctttaactatggtttcggcgcacatagcgaccttgaatggattgaagcggcggcggatgtggtgaggcacgccaaaatcgcgacgttgttgctgccaggaatcggcactattcacgatctgaaaaatgcctggcaggctggcgcgcgggtggttcgtgtggcaacgcactgtaccgaagctgatgtttccgcccagcatattcagtatgcccgcgagctcggaatggacaccgttggttttctgatgatgagccatatgaccacgccggagaatctcgccaagcaggcaaagctgatggaaggctacggtgcgacctgtatttatgtggtggattctggcggtgcgatgaacatgagcgatatccgtgaccgtttccgcgccctgaaagcagtgttgaaaccagaaacgcaaaccggcatgcacgctcaccataacctgagtcttggcgtggcgaactctatcgcggcggtggaagagggctgcgaccgaatcgacgccagcctcgcgggaatgggcgcgggcgcaggtaacgcaccgctggaagtgtttattgccgccgcggataaactgggctggcagcatgggaccgatctctatgcgttaatggatgccgccgacgacctggtgcgtccgttgcaggatcgtccggtacgagtcgatcgcgaaacgctggcgctgggatacgctggtgtttactcgagcttcctgcgtcactgtgaaacggcggcggcgcgttatggcttaagtgcggtggatattctcgttgagctgggcaaacgccggatggttggcggccaggaggatatgatcgtcgacgtggcgctggatctgcgcaacaacaaataatgatgactgccgataacgtgcattttgtatgcccatcccagcacgacagccggatgcggcgtgaacgccttgtccggcctacggatggcgtgagaatttgtaggtctgataagacgcgttagcgtcgcatcaggcatctgcgcacgactgccggatgcggcgtgaacgccttatccggcctacatttcgctacatttcgcccgtaggcagtcattaaatagttctgattacgcggctggcaatgtatcagtcgcgattcacctgcactcgcaatgaggttcatcttatgtcgactcgtaccccttcatcatcttcatcccgcctgatgctgaccatcgggctttgttttttggtcgctctgatggaagggctggatcttcaggcggctggcattgcggcgggtggcatcgcccaggctttcgcactcgataaaatgcaaatgggctggatatttagcgccggaatactcggtttgctacccggcgcgttggttggcgggatgctggcagaccgttatggtcgtaagcgtattttgattggctcagttgcgctgtttggtttgttctcactggcaacggcgattgcctgggatttcccctcactggtctttgcgcggctgatgaccggtgtcgggctgggggcggcgttgccgaatcttatcgccctgacatctgaagccgcgggtccacgttttcgtgggacggcagtgagcctgatgtattgcggtgttcccattggcgcggcgctggcggcgacactgggtttcgcgggggcaaacttagcatggcaaacggtgttttgggtaggtggtgtggtgccgttgattctggtgccgctattaatgcgctggctgccggagtcagcggttttcgctggcgaaaaacaggctgcgccaccactgcgtgccttatttgcgccagaaacggcaaccgcgacgctgctgctgtggttgtgttatttcttcactctgctggtggtttatatgttgatcaactggctaccgctacttttggtggagcaaggattccagccatcgcaggcggcaggggtgatgtttgccctgcaaatgggggcggcaagcgggacgttaatgttgggcgcattgatggataagctgcgtccagtaaccatgtcgctactgatttatagcggcatgttagcttcgctgctggcgcttggaacggtgtcgtcatttaacggtatgttgctggcgggatttgtcgcggggttgtttgcgacaggtgggcaaagcgttttgtatgccctggcaccgttgttttacagttcgcagatccgcgcaacaggtgtgggaacagccgtggcggtagggcgtctgggggctatgagcggtccgttactggccgggaaaatgctggcattaggcactggcacggtcggcgtaatggccgcttctgcaccgggtattcttgttgctgggttggcggtgtttattttgatgagtcggagatcaagaatgcagccgtgtgccgatgcctgacgcgccttattaagcaggggcgaaagggacttgcccccaatacacccacggcgtttacaggtatactcgctaaaaattattcagcgggtttggaaacaaaaatggcaaaacttaccttacaagagcagttgctcaaagcaggattagtcaccagcaaaaaagcggcgaaggtcgagagaacggcgaaaaaatcgcgcgttcaggcgcgtgaagctcgggctgcggtagaagaaaataaaaaggcacagcttgagcgtgataaacagcttagcgaacagcaaaaacaagcggcgttggcgaaagaatataaagcccaggtgaagcagctcattgaaatgaaccgaatcaccattgccaatggcgatattggttttaacttcactgacggcaatctgattaagaagatttttgtcgataagctcacacaggcgcagttgattaatggtcgtctggcgattgcccgcttgttggtcgataacaatagcgaaggtgaatacaccattattcccgccagtgttgccgataaaattgctcagcgtgatgccagcagtattgtgttgcacagcgcgctcagtgccgaagagcaggatgaagacgatccgtatgccgacttcaaagtgcctgatgatttgatgtggtaaacatagataagtcgtgcgcagatgcctgatgcgacgctatgcgcgtcttatcaggcctacggtttatgggcgaagtgtagaccggataaggcgttcacgccgcatccggcagtcgtgcgccatgcctgatgcgacgctttgcgcgtcttatcaggcctacggtttacgggcgaagtgtaggccggataaggcgttcacgccgcatccggcagtcgtgcactattatcaacgcatattcagtttattggcgtggtaggcaatatgctcgccaataaaactggagacaaaataatagctgtggtcgtaaccctcgtgataacggattaacgtcttgatattcatctcctggcagatcttttcaagatttggagtccgcagctgttccgcgtaaaaatcatcactcaacccctgatcaaccatgatttccgcaacgcgttgaccttgtgaaataagactcaccggatcgtaatccaaccaggcatctttattttcaccaagatatgcggcaaaggcttgctgtccccacggtacttgcgatggggagacaatgggcgaaaacgccgagacgctgacatattcatctgggttacgtaacgccagcaccagcgcgcccagcccgcccatagaatgaccagagatagactttctggtcgttgccggaaaatgttgcatcactaaatccggcagctcgttgcggatatagtcatacattttgtaatgttcattccacggcgcttgcgttgcgttcaggtaaaacccggcaccttgcccgagatcgtaacggtcggcatctgcgacatgactgcctcgcggactggtgtccggcgcaacaacaataatgttgtgctcagccgcgtaacgctgcatccccgatttagtaatgaaattctgctcgttgcaggtcaggcctgaaagccagtacagcaccggcaatttttcattcgcggcttttggtgggagatagacgccgacattcatttcacatttcagtgattgggaataatgccgatacacattttgccagccgccaaagctggcatgtttttcaatgagttccatcagtcattatctcacggttaatcccccggacggctgcccggggagagtattaagaaccccgtctgaagtggacggggtatacctgcgggaaatcagtaacgaattacggttcgaatggatttgccttcatgcatcaggtcgaaggcgtcattaatttcatcaaggctcatggtatgcgtgacaaacggttccagatcgatatcacctttcatcgcatcttcaaccatacccggtaactgggaacgacctttcacgccgccaaacgcggaacctttccatacgcgaccagtgaccaactggaatggacgggtggagatttcctgaccagaacctgccaccccgatgatcaccgactgaccccagccgcggtgcgcactttccagcgccgcacgcatcacgttgacgttaccgatgcattcaaaggtatggtcgataccccatttgttgatatccagcaggacatctttaatcggtttgtcgtagtcattcgggttaatgcagtcggtagcaccgaagcgacgcgccagatcgaatttcttcgggttggtatcgatagcgataatccgtcccgctttcgcctgacgcgcgccctgaaccactgccagaccaatcgcgccaagaccaaacacggcaacagaatcacctggctggactttagctgtgttgtgcaccgcgccaataccggtggtcacgccacagcccagcaggcagacgtgttcatggtttgcttctggattaattttggccagagacacttccgcgaccacggtgtattcactgaatgtagagcaccccatgtagtgataaagcggctgcccgttgtaagaaaaacgggtggtgccgtctggcatcaagcctttaccctgggtttcgcgaaccgcaacacagaggttagttttgccagaacgacagaactcacactcgccgcactccgcggtgtaaagcgggatcacatggtcgccaggtttgacgctggttacgccttcaccgacttcaaccacaacgccggccccttcgtgaccgagaaccaccgggaatacaccttccgggtcatccccggagagggtaaatgcgtcggtatggcaaacgccggtatgggtgactttaatcagcacttcaccttttttcggtggtgcaacgtcaatttcaacgatttccagcggtttaccgggagcaaatgcaacggcagcacgtgatttcatctctcgctcttcctcaatatggtaatagattcagctatttaagataggctcgaaccagttcaatagtgtcgtcaacggattggctgacttcgcggctgtagcagtcatttcggtcaaacgtttcccggatatggctttcaagcacttctgccatcagcccgttagccgcgccccgaacggcagcgatctgttggagtatggcacggcattcggcatcaccctccagcgaccgttccagagcatcaatctgcccccgaatacgacgaactcgagtaaggacctttttcttctcttccggagtactgggcatttcgcacctcatcatctgcacgcaatatactatagggaggtatgctatatgtcaatgcatacctccctatagtatataacgctggagaataaaatttatccggtgaatgtggtcggaaaacaacgaggaaagggagtggggctaatcggcagggaaggccgccccggatagcgggcggcagaagcaatcagaatttccaggtcagatgggctgcaagttgcagaccgttataatcatcggttggggtgtcgtaccacactttacctgccgtcagcccgagattaagttgctcagtcagcggttgaatacgttgcaaactgacgctcttcatgctgccgtagcgtgtttctggcgtccagtcataggtgtaagcgcctgttccgcggcttagccatagttgcgtataaccagtgccgcgcgggtcattcagacgcacggaaatcatattgctataactaccacctgcatcgctggagtcataatgggtatagcggtagctggtgatcaccgggccagtatagagtgatacgccgccttgccaggcatcgacttcgacatcatcgtaatatttagtgtagcgataaccggtcgtgaaaagcgtttttggcaacagggccaggttaatatcctgacgaaaatcctggcgggcaaagaccggcgtattatccgcaaaggcaatacccgttcgggttgtcagccagttattccatttataccagaccgcaccctgaccgcgagtggcattgaaatgttcagtttcataatcacgacgcccctgggaaagattaaaaagcagcgttgcgttttcaactttcgccaccagttcagcatacgctaaattacggttgccatgatcgccagaataatcggtaaaatcgtagcccgcggtaatggaagttaacccggcataagcgggcaatgcgctaaaaatggccgccgctaataacgtccgttttatcattttaatctcctgtacggataagttcttgtcggagtgaataagttccggtaggtaaattacgttctacaatcacgcgcgggccaagttgcgtgttcggggaaataattcgcccaggcaaaataataacttgtacgccaaggcgtgaacgctgcccgatataacaacctaatttattgcatccggtagcgataattccctctggagttcgaacagacacaggctgttcatccagacgatgattactggtacgtacttgtgcgcccaaatatgcctggtttgcaactaccgagtcggcaatataacattgcggaccaatcgttgcttccgcttcaataaccgcatttttaatttcggtggcaaaaccaatttttacaccattgctgattattgtgccaggacgaataaacgcataattacctatcaggcagtttgcgccaatcactaccggaccctgaataacggcaccatgacaaatacgggtattcgcgccgataacaacttcacctgcagtttcatcaataattacctggtctgcaatctgaataatttttctctttaacattaagcttcagatagtttttcagttcctgtgacagaaggttgggaataagcggttgacgcttccaccagtgcggaatagcgggtgggtttgtcgcgctgaggttcgcgtccagtaaaaaaggcaataagtccatagataatccagatggcataagctaataatacatacacaacggaaagcggcgctaaaggcaccaacaaccagcaacgatgaaaccaggcgctaaaagcaccaataacacaaactacgccgatccagataagcggaaacattgccaacaccacaccatgcggcccggtggtgatgaattcattaaaccaggtagtgagataaatcccaacgccataaatcacaaccaacagcataggaaatatactgaagataccgaagcggctaaataaaagccttttatgcaggcgcatacagaccgcgtagcccacaatccaacgccgccagcgacgccactcctcacgcggactgttgcattcctgtgggtatacgatgcagcgattcgcctgccgaatacggtagccgtttgccactaatgtccaggtgagatcaaggtcttcgactttagtacgatccgagaaaccgaacttacgcaatacatcagtacggaacattccgcaggcaccgctgataataaacggtgcgccgcccaggagctgctgtagcgtgcgcttcataacaatcatcggcaactttacggtcgcgcggatgtgcggtaacagccccgcgcctttcaacgcagtagagggaatgccgcctacggcatcagcaccgcgcttaatttctgccagcatatagcccattccgtcttgatcgggcggaacataggtgtcggcatcacttaaaaaaacctggtcgcaggtggcataattgaggccattcatcagcgcaccacctttaccggtatttttttgcgtgacggcaacaaagcggtcgccccatttgcgtttgacttccgccatgaccgcttcggtattgtccgtggagccgtcgttaacgcaaattacccggcaaaaataagggttacgcagtagattatccagtgactgcgccagacacgggccttcgttatacgcaggtataatggcgtcaatacagcctttcttttgactgggtttacgtcttagcgtacttaaaaaccatagcaacattgctatggacatacagataaatatccaggttttcatgcaatttgctcaaagaatcattttatgaattacaaagccttcacccagatcgctattgacctgttgcccgcgaaattgtgcaactgcacgcaggcgatcatgacgcatataatcacgtcgttcctggcttttatgtttttttaatgcagcaagtttgactgtgaaatattcttctttaacggattcaaaaacctgaggcataaatgaaagccaggtacttggggtttcgtagccgagaatttgtggaatagtgcggcaggcaaccattgaagcttgataaacagcgagatgatcctgatggcggtcggcatcatgcatggtatatacccgcatgatttcaacatcagaaggaatttgatttttaatgatgtcttccagggcggaaatcatatcattgagctgtaaatgagcgcgggtgtcagcaaaattaagatgaatagtttggtggcaccctaatatctttagggcgttgcgcgattcttcatggcgatcgattattccatctgtaccagagttgccggtagtcatcaccactgctgcgatataaattcctttttgcgcaagacgagcaagcgatgcgccacagcctaattctatatcgtcaggatgtgcgccaatagcaaggataccctttcttttatttgccgaagaaaggagggctgaatctaaaaccttatccacttaatgacactccattttatttattatactacaagcacaacgatgcactcagagacgtaatctctggcgcagccagatgttaatttataaatgttaaatgttgctaataactgaaaagcaagggctttcagacccggaggttcgactgggtaatgtttttatgcaattcatatgttaagtgtttgtatgtttggtatgtatagttattttgttttatacattgtatttagatgtgatttagtttgtcaattaattgcatttaaaaaatatgttctgtgaacaagtattgtttatatacattatgtgaatgtaatatgcgagtgattgagaatgatacagtgatatatacaatgcgaatataatagttttattatatgtattgatagaaacaatgaagtaataaatctcgtaatgtggttgtttatgcatcactaaaatgaagtgtagtaattttcccaattgttagaacggagtaattgcatatttaatctttcctttgccgtttttttgctaagaataaaatcatctgtgcgataacgactaattcttttaatgaatgtttttattcctgaatactgctcccataacaagacaggggagcagacaatcatggcaatttcatcgcgtaacacacttcttgccgcactggcattcatcgcttttcaggcacaggcggtgaacgtcaccgtggcgtatcaaacctcagccgaaccggcgaaagtggctcaggccgacaacacctttgctaaagagagcggggcgagcgtggactggcgtaagtttgacagcggagccagcatcgtgcgggcgctggcttctggcgacgtgcaaatcggcaacctcggttccagcccattagcggttgcagccagccaacaggtgccgattgaagtcttcttgctggcgtcaaaactgggtaactccgaagcgctggtggtaaagaaaactatcagcaaacccgaagatttgattggcaaacgcattgccgtaccgtttatctccaccacccactacagcctgctggcggcgctgaaacactgggggattaaaccagggcaagtggagattgtgaacctgcagccgcccgcgattatcgccgcatggcagcggggtgatattgatggtgcttatgtctgggcaccggcggttaacgccctggaaaaagacggcaaggtgttgaccgattctgaacaggtcgggcagtggggtgcgccaacgctggacgtctgggtggtgcgcaaagattttgccgagaaacatcctgaggtcgtgaaagcgttcgctaaaagcgccatcgatgctcagcaaccgtacattgctaacccagacgcgtggctgaaacagccggaaaacatcagcaaactggcgcgtttaagcggcgtgccggaaggtgacgttccggggctggtgaaggggaatacctatctgacgccgcagcaacaaacggcagaactgaccggaccggtgaacaaagcaatcatcgacaccgcgcagtttttgaaagagcagggcaaggtcccggctgtagcgaatgattacagccagtacgttacctcgcgcttcgtgcaataaaaggaggcgcagatgctgcaaatctctcatctctatgccgattatggcggcaaaccggcactggaagatatcaacctgacgctggaaagcggcgagctactggtggtgctggggccgtccggctgcggtaaaaccaccctgctgaatctgattgccggttttgtgccttatcagcatggcagcattcaactggcgggtaagcgtattgagggaccgggagcagagcgcggggtggtttttcagaatgaagggctactaccgtggcgcaatgtacaggacaacgtggcgttcggcctgcaattggcaggtatagagaaaatgcagcgactggaaatcgcgcaccagatgctgaaaaaagtggggctggaaggcgcagaaaaacgctatatctggcagctttccggtggtcaacgtcagcgggtggggattgcccgcgcgctggcggcgaatccccagctgttattactcgacgaaccgtttggtgcgctggacgccttcacccgcgaccagatgcaaactctgctgctgaaactctggcaggagacgggcaagcaggtgctgttgattacccacgatatagaagaagcggtgtttatggcgactgaactggttctgctttcatccggccctggccgtgtgctggagcggctgccgctcaactttgctcgccgctttgttgcgggagagtcgagccgcagcatcaagtccgatccacaattcatcgccatgcgcgaatatgttttaagccgcgtatttgagcaacgggaggcgttctcatgagtgtgctcattaatgaaaaactgcattcgcggcggctgaaatggcgctggccgctctcgcgtcaggtgaccttaagcattggcacgttagcggttttactcactgtatggtggacggtggcggcgctgcaactgattagcccgctgtttttgccgccgccgcaacaagtactggcaaaactgctcaccattgccggaccgcagggatttatggacgccacgctgtggcagcatctggcagccagcctgacgcgcattgtgctggcgctactcgcggcggtggtgatcggtattccggtcgggatcgccatggggctaagcccgacggtgcgcggcattctggatccggtaatcgaactttatcgtccggtgccgccgctggcttatttgccgctgatggtgatctggtttggtattggtgaaacctcgaagatcttattgatctatttagcgatttttgcaccggtggcgatgtcggtgctggcgggggtgaaaagcgcgcagcaggttcgcattcgtgccgcccagtcgctgggtgccagccgtgcgcaggtgctgtggtttgtcattttgcccggcgcgctgccggaaatcctcaccggattacgcattggtctgggtgtgggctggtctacgctggtagcggcggagctgattgccgcgacacgcggtttaggatttatggttcagtcagcgggtgaatttctcgcgactgacgtggtactggcggggatcgcggtgattgcgattatcgcctttcttttagaactgggtctgcgcgcgttacagcgccgtctgacgccctggcatggagaagtacaatgagtgaacgtctgagtattaccccgctggggccgtatatcggcgcacaaatttcgggtgccgacctgacgcgcccgttaagcgataatcagtttgaacagctttaccatgcggtgctgcgctatcaggtggtatttctgcgcgatcaagctattacgccgcagcagcaacgcgcgctggcccagcgttttggcgaactgcatattcaccctgtttaccctcatgccgaaggggttgacgagatcatcgtgctggatacccataacgataatccgccggataacgacaactggcataccgatgtgacatttattgaaacgccacccgcaggggcgattctggcagctaaagagttaccttcgaccggcggtgatacgctctggaccagcggtattgcggcctatgaggcgctctctgttcccttccgccagctgctgagcgggctgcgtgcggagcatgatttccgtaaatcgttcccggaatacaaataccgcaaaaccgaggaggaacatcaacgctggcgcgaggcggtcgcgaaaaatcctccgttgctacatccggtggtgcgaacgcatccggtgagcggtaaacaggcgctgtttgtgaatgaaggctttactacgcgaattgtcgatgtcagcgagaaagagagcgaagccttgttaggctttttattcgcccatatcactaaaccggagtttcaggtgcgttggcgctggcaaccgaatgatattgcgatttgggataaccgcgtgactcagcactatgccaatgccgattacctgccacagcggcggattatgcatcgggcgacgatccttggggataaaccgttttatcgggcggggtgatacgagtgcggacggttccctcgcccccttggggagagggttagggtgagggggcgttcaccgtactttcaacaggttaactccccctttctgagaggaaaaaaattaacgcagaatcttcttctcagccaaatccagcgcaaagtagctgaaaatcagatccgcacccgcacgcttaattgaacctaagctttcgagcacgactttctcttcatctatagcacccgccagcgcggcgaacttaatcatcgcgtactcaccgctcacctgatacgcgccaatcggcaattcagtacgttcacgcagctcacgcacgatgtcgaggtacgctccagcaggtttaaccatcaggcagtctgcgccctgggcttcatccagcagtgattcacgaatcgcctcgcgacggttcattgggttcatctgatagcttttgcggtcgccttttaatgcgcttccggcagcttcacggaacgggccataaaaggaagaggcgaacttggtcgaatacgacataatcgccgtatctttaaagcctgcagcgtccagcgcctgacgaatcgcctgtacctggccgtccatcgcggcggaaggggcgatgaagtctgcgcctgcagcagctgcaaccacggcttgcttgcctaaattttccagagtcgcgtcgttgtcgacgccatgctcgcacagcacaccgcagtgaccgtgagaagtgtattcacagaaacaagtgtctgacatgacgatcatttctggcacagtctgcttgcagatgcgcgacatacgcgccaccagtccatcttcccgccaggcgtcgctgccggtttcatcggtatggtgagagatgccaaaagtcattacggaacggataccggcgttggcgatgcgttcaatttcgcgtgccagatgtttctctggaatgcgcatcacgcctggcatggcttcaacggctttgtagtcgtcaatttcttcttcaacaaagatcggcaacaccaggtcgttaaggctaagtgttgtctcttcaaacatagcgcgcagcgcaggagatttgcgtaggcgacgagggcgttggattaagtctgtcatggtctgcctgatgtttgtggaattaaggtgcacagtatacctgaagcggggcaggagtgttttacgaaagttgtcgcgatgttgacaagaagagaatgaaagagagaccaggacatctttgtaatagaaatagcaataatttcatattcactgaaaatatttttaatctttatttatagctcttggttattatttttttggcgtttggttgtgctgctataaattgaataattcaaactttgttgtatattgataagatatttatctggtttgtgtttttgatatttataacgcgtatgtatcaaaaataacattatctgcaacatgttgaaatatcgtccttttatcaatttgatgcgtgtttttctccataaattatatatgtccacattcggacttaggggaaagaataattgaaccattcgtctgtaacgcagcataatcgttagcgcgaaacataatatgttttctatgcattgataattgatggatcaacttattacgtccctgaggagggatgacaaatgcactcctggaaaaagaaacttgtagtatcacaattagcattggcttgcactctggctatcacctctcaggctaatgcagctacttataacaccttcgggtatcacgatgacgcagccaccatctacaattggggtgacagcactaaaattgatcacgattatctgacttacggtggttatgtatatgaccacgcagctgatggttactttgataccactttcagcggcgacactgtaaatggtgtaatttctacttattatctgaaccacgattatggcacagataccggtaatacactgaacatctccaactcaattgttcatggtatggttacatcttaccaggttggttatggcgactacgtctggaccaacggtagcgattatactggccacgactgggttgatggcgacatcttcactctgaacatcgctaattctactattgacgatgattttgacgccttctacttcaccgatacttatctggatgcagacggtaaaacatctaagacagattatgatcgtttggtaaccgctggtcttggtaccgctgtgactctggatgttgaaagtaacatcaacatcagcaacaactcccatgttgcaggtattactttggttcaacacgacctcggtaatgcgacctacaataccgaaggtcatcagtgggacaacaacatcgttgttaatgactctactgtaacttctggttcatggactgaagacgaacaatcagatcgtggtcatttcggcaattctgttgaaccaagtgactacggcaatggcgcatctcctgctgatgatgttgcgttagccttcatcgatgatgacacttctgattatcgtatggtcaacaacgttacgttcaacaactctcagttgcttggtgacgttgtatttgacagtacctggaacgctaactttgacgcgacgggtcacctgattgacaactctaccactgcttacactcatggcggttgggcaactgacgatcagaacgtcgatcacctgaacctgactctgaacaacaccaaatgggttggttcagcgaatattgattatgacgttgttgttgctgacgaagccttctacgacgttgcaccaaacagcctgaacccgtacgcttcttactctgaagatggctggaatcgtgttgataacgctaacgcattccagagcggcgtattcgatgttgttctgaacaacggttctgattgggaaaccacgaaaacttccctgatcgataccctggcgatcaacagcggttctcaggttaacgtgagtgcagattcttctctgacttctgacaccatcactctgaacggtggttcttcaatggaagttaacggtgaagttaacaccgatcacctgaccattgataccttctcaaccgttaacttcggtgaagatactgcttcagcttgggcatatgcaccgctgtatgccaataccattaccgttactaacggtggtgtgctggatgtaaacaccaacatgaatgacatctccagcgtatttgcaactgatactctggaactgaccagtggcaacgttaaagataacaacggtaatgtttacgcaggtgtgtttgacattcatagtaatgattacatcctgaatgcagacctcgtcaacgatcgtaccaacgacaccagcaaagctaactacggttatggtgttattgcgatgaactctgatggtcacttgaccgttaatggtaacaacgacattaacaatggcgacgaagttgacaacagctctgcagacaacgttgtagctgcaaccggtaactacaaagttcgtatcgacaactccactggcgctggtgcgattgctgattacgcaggtaagcagctcatctatatcgatgataccaaaaccaacgcgaccttctctgctgctaacaaagctgacctgggtgcatacacctatcaggctgaacagcgcggtaacaccgttgttctgcaacagatggagctgaccgactacgctaacatggcgctgagcatcccgtctgcgaacaccaatatctggaacctggaacaagacaccgttggtactcgtctgaccaactctcgtcatggcctggctgataacggcggcgcatgggtaagctacttcggtggtaacttcaacggcgacaacggcaccatcaactatgatcaggatgttaacggcatcatggtcggtgttgataccaaagttgacggtaacaacgctaagtggatcgtcggtgcggctgcaggcttcgctaaaggtgacatgaatgaccgttctggtcaggtagatcaagacagccagactgcctacatctactcttctgctcacttcgcgaacaacgtctttgttgatggtagcttgagctactctcacttcaacaacgacctgtctgcaaccatgagcaacggtacttacgttgacggtagcaccaactccgacgcttggggcttcggcttgaaagccggttacgacttcaaactgggtgatgctggttacgtgactccttacggcagcgtttctggtctgttccagtctggtgatgactaccagctgagcaacgacatgaaagttgacggtcagtcttacgacagcatgcgttatgaactgggtgtagatgcaggttataccttcacctacagcgaagatcaggctctgactccgtacttcaaactggcttacgtctacgacgactctaacaacgataacgatgtgaacggtgattccatcgataacggtactgaagggtctgcggtacgtgttggtctgggtactcagttcagcttcaccaagaacttcagcgcctataccgatgctaactacctcggtggtggtgacgtagatcaagactggtccgcgaacgtgggtgttaaatatacctggtaatattcttcactccgaagaaatactggtaatttaatctaaataatgcccgtcaaggatttgacgggcattactgcaaaggacgcgcaaatgttatctgtagttaaacctcttcaggaatttggtaagctcgataaatgtttgtccagatacggtacgcgcttcgagtttaataatgaaaagcaagttatattttccagtgatgtcaataacgaagatactttcgttattttagagggagttatctctctgcgtagagaagaaaacgtacttatcggtattacccaggccccttatattatggggctggctgatggtttaatgaaaaacgatataccatacaaattaatatcagaaggaaattgtacgggatatcatctaccagccaaacaaaccattacgcttattgaacaaaatcaactctggcgagacgctttttactggttagcctggcaaaatagaattctggaattacgcgacgtgcagctcattgggcataattcctacgaacaaatccgcgcaacattattatcaatgattgactggaatgaagaattgcgatcacgtattggtgtgatgaattatatccatcaacgtacacgcatatcgcgttctgtcgtcgcagaagttctcgctgctttgcgtaaaggcggctatatcgaaatgaataaaggcaaactggtcgctatcaaccgtttgccttcagagtattaatcaggatgcggggataaccaacggtttattcccgcttagctcggtcaccagatcattgatgccatcgctcatatttttaaagcgcgtcaacggcgaacgagtgaccaccacaaacgcgccaatattcttctgcgggatcatcgccatataggtaatgaaaccgccaccaccgcctgtcttctgaataatccccggacgaccctctttcggggccatatatacccagcctaaaccaagcgcatccgctttgccggggacatccatgccaatcactttcgtaaactgcgcgcgctgataaatcaacgtctgcatgcgatctgcctggttactgcgctgataaaaatcagatgacaaatactgctgcatccagcgcatcatatcgccaggcgtggaatagacgccgccgctgccaattgccgccagcgtgttattgcacggactggcaccgcgctcagcaaccattaaacggcggcactgatccggtgagggggtgtaggtggtgtctttcatccccaatggacgggtaatctgctcttcaaacaactgggtataaggcttgccggacgcattcgccagtgcatctgccagcaggtcgaacgcaaggttagagtacgccgcctgactgcctggcgcggctttcagcttcgccgtagaaaggtatttccagcgttgctcgcgcgttggccagacaaacaccggacgatgtgccgcgccaccgggctgttcacggggcagggcgctggtatgggttgccagattcactagggtaatgggcgtcccattgtaggtcggcacgcgtgcgcctggcggagcatatttacttagcggatcgtttaactttacggtcccctggtcgagcaatttcaccagcatttcactggtcattagtttggtgagggaagcaatacgcacgaccgaatccagctgcgggcgaacgttattaccaggtcgcgtttcgccataactacgaaagacgcgctggttaccgtcgataacaaccagcgccatccccgttgcaccgctgccgtaaaaaatatgatcggcataacgatcgacaatatcagaggcaaactccggttcagtgatcggctgcgccgcatggacggaggtcaatgacgccgcacacagcacggcagaaaaaagcagactacgtttcaacggtggtgtccatagattgaatgaaggtaactgagcgtatttatactactcattgatggattgcaaagggcgaattagtgcaataatagtgttaaaaacgtaacggcgcgtaaacacgatctttttcctgctcaccaatgcctgcatttgtgatcctgcgcgtgttaatccgcttatgtaaacaatctttggtttgtgaaatccgtcgaaacaattcttatggtcaggctggcgaactaagcgccttgctatgggtcacaatgggcggtttcatttggctgacgctttgtagtggtcatgcggttaatacacagcagttgttaaaacgataagaagttagcaggagtgcatatgtttaagtcttttttcccaaagccgggagcgttttttctctcggcctttgtttgggcattgattgccgttatcttctggcaagccggtgggggagactgggtggcgcgtatcaccggcgcttccgggcagatcccgattagcgccgcgcgtttctggtcgttggatttcctgattttttacgcttactacattgtttgcgtaggactttttgcatttttctggtttatctacagcccgcaccgttggcaatactggtcaatactcggtactgcactgatcatcttcgtcacctggtttttggtggaagtcggggtcgccgtcaacgcctggtatgcaccgttctatgatttgattcaaaccgcgctaagttcgccgcataaagtcactatcgaacaattttaccgcgaagtgggcgtctttctggggattgcgctgatcgcggtggtgatcagtgtactgaacaacttctttgtcagtcactatgtgttccgctggcgtacggcgatgaacgaatattacatggcgaactggcaacaactgcgtcatatcgaaggtgccgcacagcgtgtgcaggaagacaccatgcgttttgcttcaacgctggagaatatgggcgtcagttttatcaacgccatcatgacgttgatcgccttcctgccggtgctggtaacgctctccgcgcatgtgccggagctgccgattatcgggcacattccgtatggtctggtgattgccgctatcgtctggtcgctgatggggaccggatggctggcagtggtagggatcaaactgccggggctggagtttaaaaaccagcgagtagaggccgcctaccgtaaagagctggtttatggtgaagacgatgccacgcgcgcgacgccgcctacggtacgcgagctgtttagcgccgtacggaaaaactattttcgcctctattttcactatatgtatttcaacatcgcccgcattctctatttgcaggtcgataacgttttcggtttgttcttgctgtttccgtcaattgttgccggtacgattacgctcggcctgatgacgcagattaccaacgtttttggtcaggttcgcggtgctttccagtacctgattaactcatggaccacactggttgagttgatgtctatctacaaacgtctgcgcagctttgaacatgagctggatggtgacaaaattcaggaagtaacccataccttgagctaaaaaggagaagtaatgtcgcgcgtcaatcatctatcttcgctgtcattgttggcggttctggttttagcggggtgtagtagtcaggctccgcaaccgttgaaaaagggcgaaaaagcgatagatgtagcgagcgtcgtgcggcagaagatgcctgcgagcgtgaaagaccgcgatgcctgggcgaaagatctcgccatcacctttgaaagtcaggggctggcaccgacgctggaaaacgtctgctcggtgctggcggtggcgcagcaggagtcaaattatcaggcagatccggccgttccgggcttaagcaagatcgcctggcaagagattgaccgtcgtgctgaacggatgcacattcctgcttttctggttcataccgcgctaaaaatcaaatcgccaaacggcaaaagttatagcgaacggttagattcggtgcgtacagaaaagcaattgagcgcgatttttgacgatctgatcagcatggtaccaatggggcagacgctgtttggttcgcttaatccggtgcgcaccggtgggccgatgcaggtcagcattgcttttgccgaacagcataccaaagggtatccgtggaaaatggacggtacagttcgtcaggaagtcttcagtcgccgcggcgggttgtggtttggtacttaccatttactgaattatcccgccagctatagcgcaccgatataccgctttgctgattttaacgctggctggtacgccagccgtaatgccgcgtttcagaacgcagtcagtaaggccagcggcgtgaagctggcactggacggtgatttaattcgttacgacagtaaagaacccgggaaaaccgaactggcaacgcgcaaactggcgggaaaactggggatgagcgacagcgaaattcgccgtcagttagagaaaggtgacagcttctcttttgaggagacggcgctgtacaagaaagtttatcaacttgccgaagcgaaaacgggtaaatcactaccccgcgaaatgttgcctggcattcaactggaaagcccgaaaatcacccgcaacctgactacggcctggtttgcgaagcgcgtagacgaacggcgggcgcgttgtatgaaacagtgatcaaacaggaatgtcatgccagataaggcgttttaggccgtatctggcaacgtaaatcttactggcggcgatgtcgccagtgcagccatagcgccaccactgcaaaaatgaggcagcctactaaaaacgggatcagcccgaaaatggtgccgacacctaaaccaatttccacccgtgggcgacctgtttcctggacctgcattaaacgctcatagacgccgggcgcatgcactaacaggttcagcaattgcgccccagcccaaaagcaaaacagcacaaacaacgcataggcaatgttgccaggcgttgaagaggcattgcgatattttccgctaaacagcgattttgacagggtgaaatcagccataaaaacctccggaagtcatctgcttctcttctggtgtgataccagcggcttatggcaagtctgacaggtcatttagattgtcaatatcagaatcatggtaaattgatgttgggaatattcccgaagcgtgaatcttcgttgtgagttacaaaatggcaaccttaagttaaatttattaacaattacgaaaatgttgtctacaccacagacggttgttacagaatatgcaaggatgttgtttttcgttaacggagctgccatgaatctgcctgtaaaaatccgccgtgactggcactactatgcgttcgccattggccttatattcattcttaatggcgtggtggggttactgggatttgaagcaaaaggttggcagacctatgccgtcggtctggtgacgtgggtgattagtttctggctggcggggttgattattcgtcgtcgcgatgaagaaactgaaaacgcccaataagaatattatcgggcgttaaaatattacattgtggttttcaatgcgttatccgcagcgtgacgctccagcgccagctcaatcaaacgtgtgatcagatcggtgtaacccagaccgctggcttgccacagcttcggatacatactgatgttggtgaagccaggcagtgtgttgatctcgttgatcaccacttcgttctctggggttaaaaacacgtctacacgcgccatgcctgcgcatcccaacgtctgataagcctgaacggcaatcgcccggatcttatcgttgatctctggtgcaatggctgccggaactaccactttcgcgccatcttcgtcaatgtacttggtgtcgtaggcatagaaatcgctggtgagtacgatctcgccacaggtgctggcttgcggattgtcgttgcccagaactgcgcattcgatctcacgacctttgatcccttgctcaacgatcactttatgatcgaactcgaacgccagatcgacggcaattgcgtactgttcttcactggttactttgctgacaccaacagaagagccctgattagccggttttacaaacagtggtaaccccagtttagactccacttcggcaaaactgatgttgtgacgattagcgcgcgtcagggtaataaatggcgcaatgttcagcccggcatcgcgtagcagacgtttggtgacatctttatccatacaggctgctgaagccagaacatcagaacctacaaacggtaaattggcgacccgcagcattccctgcaaggaaccatcttcgcccagcgtaccgtggacaatcgggaaaatgacatccaccgtcggcaacggctgaccgttttgcgcgtcgataagctgatgctcatgtttacctggcacctgcgcaaggctggtcgccgaagggcgcaacgcaatatgggcaggatcgtctgcatttagcagataattgctggcatcgctgacgtgccattgcccttgtttatcaatgcccagcagcacaacgtcgaagcgacttttatcaatggcatcgacaatgttttttgccgattgcagagacacttcatgttccgctgatttaccaccaaaaacgattcctacccgcagtttttccatcttaaaaacctatcccgtctaacacaaagtgcatacattaccacgacaaaacgggggattcgcggccttctgaaagattgttgcaatcttctgctgacaaagcgtgcaacgtactggtgaagaaagtgcgttatctcaaagatgtgcgcgagatcacaaaaatgatgaacgggaagctaatttattcctggcttaaatggcaatgcggtgagtttttttctcttaattataagttaacgaagagaatatatttcataacttttatttataataaaggttgataattaaaagcctatattttgtgtgggtaattatttaaataagagaaacgtttcgctggtaatcaaacaaaaaatatttgcgcaaagtatttcctttgtcataaaaataatacttccagacactatgaagttgtgaaacataatgttaacttctccatactttggataaggaaatacagacatgaaaaatctcattgctgagttgttatttaagcttgcccaaaaagaagaagagtcgaaagaactgtgtgcgcaggtagaagctttggagattatcgtcactgcaatgcttcgcaatatggcgcaaaatgaccaacagcggttgattgatcaggtagagggggcgctgtacgaggtaaagcccgatgccagcattcctgacgacgatacggagctgctgcgcgattacgtaaagaagttattgaagcatcctcgtcagtaaaaagttaatcttttcaacagctgtcataaagttgtcacggccgagacttatagtcgctttgtttttattttttaatgtatttgtacatggagaaaataaagtgaaacaaagcactattgcactggcactcttaccgttactgtttacccctgtgacaaaagcccggacaccagaaatgcctgttctggaaaaccgggctgctcagggcgatattactgcacccggcggtgctcgccgcttaacgagtgatcagaccgccgctctgcgtgattctcttagcgataaacctgcaaaaaatattattttgctgattggcgatgggatgggggattcggaaattactgccgcacgtaattatgccgaaggtgcgggcggcttttttaaaggtatcgatgccttaccgcttaccgggcaatacactcactatgcgctgaataaaaaaactggcaaaccggactacgtcaccgactcggctgcatcagcaaccgcctggtcaaccggtgtcaaaacctataacggcgcgctgggcgtcgatattcacgaaaaagatcacccaacgattctggaaatggcaaaagccgcaggtctggcgaccggtaacgtttctaccgcagagttgcaggatgccacgcccgctgcgctggtggcacatgtgacttcgcgcaaatgctacggtccgagcgcgaccagtgaaaaatgtccgggtaacgctctggaaaaaggcggaaaaggatcgattaccgaacagctgcttaacgctcgtgccgacgttacgcttggcggcggcgcaaaaacctttgctgaaacggcaaccgctggtgaatggcagggaaaaacgctgcgtgaacaggcacaggcgcgtggttatcagttggtgaacgatgctgcctcactgaattcggtgacggaagcgaatcagcaaaaacccctgcttggcctgtttgctgacggcaatatgccagtgcgctggctagggccgaaagcaacgtaccacggcaatatcgataagcccgcagtcacctgtacgcctaatccgcaacgtaatgacagtgtaccaaccctggcacagatgaccgacaaaaccattgaattgttgagtaaaaatgagaaaggatttttcctgcaagttgaaggtgcgtcaatcgataaacaggatcacgctgcgaatccttgtgggcaaattggcgagacggtcgatctcgatgaagccgtacaacgggcgctggaattcgctaaaaaggagggtaacacgctggtcatagtcaccgctgatcacgcccacgccagccaggttgttgcgccggataccaaagcgccgggcctcactcaggcgctaaatactaaagatggcgcagtgatggtgatgagttacgggaattccgaagaggattcacaagaacataccggcagtcagttgcgtattgcggcgtatggtccgcatgccgccaatgttgttggactgaccgaccagaccgatctcttctacaccatgaaagccgctctggggctgaaataaaaccgcgcccggcagtgaattttcgctgccgggtggtttttttgctgttagcaaccagacttaatggcagatcacgggcgcaaacgctcatggttaaaacatgaagagggatggtgctatgaaaataacattactggttaccttgctttttggtctggtttttttaaccaccgtcggcgctgccgagagaaccttaaccccacaacaacagcgtatgacctcctgtaatcagcaggcgacggcgcaggcgttgaaaggggatgctcgtaagacctacatgagtgattgcctgaagaacagcaagtctgcgcctggtgaaaaaagtttgacgccacagcagcaaaagatgcgcgaatgtaataatcaagcaacgcaacaatctctgaaaggtgatgatcgtaataagtttatgagtgcctgcctcaagaaagccgcctgatacctgatagtgctaacgggtgagctacgaaagtggctcacccgaaatttcatacttctgcctttagccccgtctctataatttgggaaaattgtttctgaatgttcccaaaaataatgaatgatgaaaactttttcaaaaaagcggcggcgcatggggaggaacctcctttaactcctcaaaacgaacatcagcggtccgggctgcgcttcgcccgtcgcgtcagactaccccgtgcggttggcctggctggcatgttcttaccgattgcttcaacgctggtttcgcacccgccgccgggctggtggtggctggtgttggtcggctgggcgttcgtctggccgcatttagcctggcagatagcgagcagggccgtcgatccgcttagccgggaaatttacaacttaaaaaccgatgcagtattagcgggaatgtgggtaggcgtaatgggcgtaaacgtgctgccttccaccgctatgttgatgattatgtgtctgaatttgatgggggcaggcggcccccgtctgtttgtcgcgggtctggtgttgatggtggtttcctgccttgtcaccctcgagcttacgggcattaccgtgtcgttcaatagtgcgccgctggaatggtggctctcccttcccattattgtcgtttatcctctgctgtttggctgggtcagctaccagacggcaaccaaactggcggaacataaacgcaggttgcaggtcatgagtactcgcgacggcatgacgggcgtgtataaccgacgtcattgggaaactatgttacgcaatgaatttgataactgtcggcggcataatcgcgatgcaacgttactgattatcgatatcgaccatttcaagagcatcaacgatacctggggtcatgatgtgggcgatgaagcgattgtggcgcttacccgacagttacaaattaccctgcgcggtagcgggtaatgactccaacttattgatagtgttttatgttcagataatgcccgatgactttgtcatgcagctccaccgattttgagaacgacagcgacttccgtcccagccgtgccaggtgctgcctcagattcaggttatgccgctcaattcgctgcgtatatcgcttgctgattacgtgcagctttcccttcaggcgggattcatacagcggccagccatccgtcatccatatcaccacgtcaaagggtgacagcaggctcataagacgccccagcgtcgccatagtgcgttcaccgaatacgtgcgcaacaaccgtcttccggagactgtcatacgcgtaaaacagccagcgctggcgcgatttagccccgacatagccccactgttcgtccatttccgcgcagacgatgacgtcactgcccggctgtatgcgcgaggttaccgactgcggcctgagttttttaagtgacgtaaaatcgtgttgaggccaacgcccataatgcgtgcagttgcccggcatccaacgccattcatggccatatcaatgattttctggtgcgtaccgggttgagaagcggtgtaagtgaactgcatttgccatgttttacggcagtgagagcagagatagcgctgatgtccggcagtgcttttgccgttacgcaccaccccgtcagtagctgaacaggagggacagctgatagaaacagaagccactggagcacctcaaaaacaccatcatacactaaatcagtaagttggcagcatcaccctatcgtgagtggttgaaatcggcagatttggcgctttacaaagcaaagaaagccggacgtaaccgcaccgaagtggcggcctgacgtccggcgaaagtcatcaggatttgctgagtttttctgatttttccatacacttcgtcatcgcttcgatcactgcggcacggaagcctttctcttccagtacgcgtaccgcttcaatggtggtgcctcccggtgagcagaccatatctttcagtgcccccggatgttctcccgtttccagcaccatttttgcggaacccattaccgcctgagcggcaaatttatacgcctgggcgcgtggcatcccgcccagcacggcggcgtcggccatcgcttcgataaacataaatacgtaggctggcgaagaaccgctcacaccgaccaccgggtggatcatcggctcagcaattacttccgcttcgccaaagcagcggaaaatattcagcacatcagcggtatcttcgggggttaccagcgcgtttggcgttacggaggtcatcccggcattaaccagcgcgggagtgttcggcatggcgcggataattttccggtcatggcccagcgcgcgggcaagctggtcgagcgtgacacctgcagcaatagaaacgaccagagagtctttattcaggctggaggtgatttcgctaagcactttaatcatgatgccaggtttaacggcggcaaaaatgatgtcggcgatttgcgccacttcttgcgccgattctgcggcgttgatgccgaactggtcatgcagggcggcgactttatccggggagggggtgtatacccagatttgccctggaagcacctgaccgctggcaatcagaccgccgagaatggcttttcccatattgccgcagccaataaaaccgattttcttttccattgcctcactcctgccgtgaaattcattgttttgataatcgctggcagaagcataaacagaactatgccggaaggcaaaagcgcgacacaatagaggattacccaacaaaggatgactttatgacaatttgggtggatgccgacgcgtgtcccaatgtaattaaagagattttgtatcgcgcggcggaacgtatgcagatgccgctggtactggtagcaaaccagagtttacgcgtgccgccatcgcgatttattcgtacgctgcgcgtcgcggcaggtttcgacgttgccgataacgaaattgtccggcagtgtgaagcgggcgatttggtgatcaccgcagatatacctttggctgctgaagccatcgagaaaggcgcagcggcgcttaatccgcgcggcgaacgttacacgccagcgaccattcgtgagcgcctgacgatgcgcgattttatggataccttacgtgccagtgggatccagaccggcggaccagatagcctttcacaacgtgaccgccaggcctttgccgcggagctggagaagtggtggctggaagtgcaacgtagtcgtggctaaatgtaatttattatttacacttcattcttgaatatttattggtatagtaagggatgtattgagattttcactttaagtggaattttttctttacaatcgaaattgtactagtttgatggtatgatcgctattctcatgacaccggctttcgccgcattgcgacctattggggaaaacccacgatgacacaacctctttttctgatcgggcctcggggctgtggtaaaacaacggtcggaatggcccttgccgattcgcttaaccgtcggtttgtcgataccgatcagtggttgcaatcacagctcaatatgacggtcgcggagatcgtcgaaagggaagagtgggcgggatttcgcgccagagaaacggcggcgctggaagcggtaactgcgccatccaccgttatcgctacaggcggcggcattattctgacggaatttaatcgtcacttcatgcaaaataacgggatcgtggtttatttgtgtgcgccagtatcagtcctggttaaccgactgcaagctgcaccggaagaagatttacggccaaccttaacgggaaaaccgctgagcgaagaagttcaggaagtgctggaagaacgcgatgcgctatatcgcgaagttgcgcatattatcatcgacgcaacaaacgaacccagccaggtgatttctgaaattcgtagcgccctggcacagacgatcaattgttgattttagagcgcctatacttaacgttcatcccgtgaaataaggaagaacgatgccaacgaaaccgccttatcctcgtgaagcatatatagtgacgattgaaaaaggaaagccaggacagacggtaacctggtaccaactcagagccgatcatcctaaaccagactcgttgatcagtgaacatccgacggctcaggaagcgatggatgcgaaaaaacgctatgaggaccctgacaaagagtgaccgcatcagactgctcggaagggattctgagtgccactacaagggatctgcgtcacatttttcataattcatgtttttctaataattagaatattaaacaataacaatccattactggaatcatttggaatctttacattatgccgtgcacgtctgctgctacgctttttgtcatttgtagcacaagtaagtgtcagcagtggtgcttcacacttgcccggtaattaacgacgaaagaaaagtaaggtggatgaacaatgagtgcgtcgttggcgatcctgaccatcggcattgtacctatgcaggaggttttgccgctcctgacggaatacattgacgaagataatatttcccatcatagcctgctggggaagttaagtcgtgaagaagtgatggcggagtacgcgccagaagcaggcgaagacaccattctcacattattaaatgacaaccagctggcccatgtttcgcgtcgtaaagtggagcgagacctgcaaggtgtggttgaagtgctcgataatcagggttatgacgtcattttattaatgagtacagcaaacattagtagtatgactgcgcgtaatacgatctttcttgagccgtcgcgaatattgcctccactggtttcctctattgttgaagatcatcaggtgggggttatcgttccggttgaggagatgctgaccgttcaggcgcaaaaatggcaaattttgcagaaatcgccggtattttcattgggtaaccccattcatgattcagaacaaaaaatcattgatgccgggaaagaattactggcaaaaggggctgatgtcatcatgctggattgtttaggatttcaccaacgtcatcgcgatttactgcaaaaacagctcgatgttcctgtcttgctgtctaacgtattgattgcacggctggctgcggaattactggtgtaattttgcgtgacagccagcgcctctggcccctatagtgaagtagatgttcaactaccagacagggccagtttatgcttcaaagtaatgagtacttttccggcaaagtgaaatcaatcggcttttccagcagcagcactggtcgcgccagcgtgggtgttatggttgaaggcgaatacaccttcagcaccgctgagccggaagagatgacggtaatcagtggcgcgctgaatgtgttactgcctgacgcgaccgactggcaggtgtatgaagccggttcggtgtttaatgttcccggtcacagtgagtttcatctgcaagttgccgaacccacctcttatctgtgccgctatctgtaattcctcgccttccccttgaacgggagggcatttttctgaaatatcctctctttaacccataataatatttcctttgctgtaatgccgatcagttaaggatcagttgaccgatccagtggctgtgtaagaatccggaaacgctcacttgtttccggatttttttatgcacattggacaggctcttgatctggtatcccgttacgattctctgcgtaacccactgacttctctgggggattacctcgaccccgaactcatctctcgttgccttgccgaatcaggtactgtaacgctacgcaagcgccgtcttcccctcgaaatgatggtctggtgtattgttggcatggcgcttgagcgtaaagaacctcttcaccagattgtgaatcgcctggacatcatgctgccgggcaatcgccccttcgttgcccccagtgccgttattcaggcccgccagcgcctgggaagtgaggctgtccgccgcgtgttcacgaaaacagcgcagctctggcataacgccacgccgcatccgcactggtgcggcctgaccctgctggccatcgatggtgtgttctggcgcacaccggatacaccagagaacgatgcagccttcccccgccagacacatgccgggaacccggcgctctacccgcaggtcaaaatggtctgccagatggaactgaccagccatctgctgacggctgcagccttcggcacgatgaagaacagcgaaaatgagcttgctgagcaacttatagaacaaaccggcgataacactctgacgttaatggataaaggttattactcactgggactgttaaatgcctggagcctggcgggagaacaccgccactggatgatacctctcagaaagggagcgcaatatgaagagctcagaaaactgggtaaaggcgatcatctggtgaagctgaaaaccagcccgcaggcacgaaaaaagtggccgggactgggaaatgaagtgacagcccgcctgctgaccgtgacgcgcaaaggaaaagtctgccatctgctgacgtcgatgacggacgccatgcgcttccccggaggagaaatggcggatctgtacagtcatcgctgggaaatcgaactgggatacagggagataaaacagacgatgcaactgagcaggctgacgctgagaagtaaaaagccggagcttgtggagcaagagctgtggggtgtcttactggcttataatctggtgagatatcagatgattaaaatggcggaacatctgaaaggttactggccgaatcaactgagtttctcagaatcatgcggaatggtgatgagaatgctgatgacattgcagggcgcttcaccgggacgtataccggagctgatgcgcgatcttgcaagtatgggacaacttgtgaaattaccgacgagaagggaaagggccttcccgagagtggtaaaggagaggccctggaaataccccacagccccgaaaaagagccagtcagttgcttaactgactggcattattcctttgctgcgattttttcaatttccgatatattcataattcatcaaggttgatataaatatcagtgaagatctccaggtattttttgcggaactggctacgataaaagataaatcagatgatgaatggtggcgtgcattgctgcaaagtcgcaatgatcatttgcgccaaacggcattacgcaacgcacataccccggcgtcgttgttaacgacattgactgagtctcaggatcggtcgctggctattaataatccacagctggctgccgatgtgaaaacggcgtggttaaaagaggatctatcattactcttatttgtcgaacaacccgatctttcgcagttacgtgatttagtgaaaaccggggcaacgcggaaaattcgcagtgaagcgcgtcaccggcttgaggaaaaacaatgacacaacgtccatggagcaagttacagcgggagatctatgacttactgacgccaacgatcaacctgcaaattcactgtacccgttatctcatgcgcagccaaaatggtggaagtaccgatttaccgcgttattggatcacgttggataaaaacgtgatctgggattacccgaaagactttattgcaggtaacgctggagtgcgtaattttcacggtgaaacttgctggtatccttacctgacggatatttgttcaatttctgatttattgcgtgaatatattgataccccaaaagcggagctgttaacaaaacaatttaccagcgataaatgggggttagtgaatattctgcgtgctgctgacaggcgaatagggatgaggcgattagatcagttacggcgtaaaacgcataatattgctgcgctaaaaattattgctcgccgtagcgaataattatatgcctggtgtggcttcgtacgccggataagacgcggcaggcgtcgcatccggcattaaaggaaaatcagcaattaacgttgtgcttcgccacctaatccttcaatcaggttttgaattaacgctgccagttcaccagtcatcaggatgaaatcggcatcaaaacgcagggcgaaatcttcacggtcgatatcttcgttttgatcgcgcagctcgtcgcagaacttaagacgcttgagcgaaccatcgtcgcacatcacaaactgaatgcgctgctgccagtcgagcgccagtttagtcaccacttttccggcttcaatgtgattggtgatctcttcgctggtcagatcttgtttcttcgcgcggatcacgccgccatcttccagcaacgatttcagctcggcttcatcaagcagctggaagccctgtgccgcactaccggagcgaacccattcggtcagcgtcagttcaatcgggttttccatgctcaatggtacaaccggtaacgaccccaggcttttacgcagtaatgccagcgtatcttccgcttttttggcactggcgcagtccaccataatcaaaccgttaaccgtgtcgatccacatcattgtctggctaaaacggctgaaagcacgcggcagcagagagtgcagcacttcgtctttcagcgaatctttttcggttttcttcagcttacgcgcctgttccgcttccagtttggcgattttcgcttccagcgcctgtttaatcaccggagacgggaggattttttcttctttgcgcgcgcagataacaatttgaccattggcaacgtgcgttaacgcatcgctgtgcgatcccatcggaggaacccagcccatcttcgccatgtcctggctgccgcatggggtaaatgccatcgaggctagctgtttttccatctcttctgcacgcagcgaaatctcgcggctaagacggtaaaccattaaatttttgaaccacagcatgataatttccacggccttgtcgttaaatttagcgggcatgataacgaattgtcggcggccttgcattgccaatccggttgtccgtctctacgctattgatattgaaaaaaataaggagagtacagtgcgtataggtatcgatttaggcggcaccaaaactgaagtgattgcactgggcgatgcaggggagcagttgtaccgccatcgtctgcccacgccgcgtgatgattaccggcagactattgaaacgatcgccacgttggttgatatggcggagcaggcgacagggcagcgcggaacggtaggtatgggcattccaggttcgatttcgccctacaccggtgtggtgaagaatgccaattcaacctggctcaacggtcagccattcgataaagacttaagcgcgaggttgcagcgggaagtgcggctggcaaatgatgccaactgtctggcggtttcagaagcagtagatggcgcggcagcgggagcgcagacggtatttgccgtgattatcggcacgggatgcggcgcgggcgtggcattaaatgggcgggcgcatatcggcggcaatggcacggcaggcgagtggggacacaatccgctaccgtggatggatgaagacgagctgcgttatcgcgaggaagtcccttgttattgcggtaaacaaggttgtattgaaacctttatttcgggcacgggattcgcgacggattatcgtcgtttgagcggacatgcgctgaaaggcagtgaaattatccgcctggttgaagaaagcgatccggtagcggaactggcattgcgtcgctacgagctgcggctggcaaaatcgctggcacatgtcgtgaatattctcgatccggatgtgattgtcctggggggcgggatgagcaatgtagaccgtttatatcaaacggttgggcagttgattaaacaatttgtcttcggcggcgaatgtgaaacgccggtgcgtaaggcgaagcacggtgattccagcggcgtacgcggcgctgcgtggttatggccacaagagtaaaaaacgtaggcaattggcgcatcatgcctgatgcgacgcttgccgcgtcttatcaggcctacaaaatgtgccagaaccgcgtagggcggataaggcgttcacgccgcatccggcaataagcaacgcgcaccgtgacagtaatctaccccagtggtttcgccagcaccggactatccgccgcttgctggcgcttatagcgaccatacagcagcaacgatgacatcgcagcaaacgaaagcagggcggcaggcagcgccacgtaattatatgccagccccagcgtcagcatcatacctccgcaatatgcgccgacggcgctaccgaggttaaacgctatttgcccacctgcggcacctaataactctccgcctttggcgttttgcagtaacaatatttgcagaggtgctgaaagggcaaataatcccgcgcaacaaataaaagcaaaaataagcgacgttgttttcatgccgccgcagaaaaagagcatcagcagtgccagtacaatgataaagtcagtcactgctgcaatgcgcagtggtgaataacgtcctgaaatcctgccacttagcatatttcccagcaccatccctagcccaactaacatcataataaaggtcatcgccgtttccgaaaaaacggaaataaacatcatgtatggctttacgtagctgaaccaggcaaagacacctgcgttgccaaacatcgtggcggcgaaaattaaccacggggccgggctgcgcaaaaagtgaaattgttcgcgcagatttcctttcgcctcgtcgcgaatatctggcacccaaaaatagaccgatgccatcaccgcaatattaaaaacagcgatcaataaaaaggtgtaacgccagctaaattcctgacttaaatacgttcccagcggaatgcccagcaaattggcgactgtcatcccggaaaccatccccgccacggcggcggtgacttttccgggtttgataatttttgataacacgatcgcgccgacgccaaaaaatgcgccatgcggaaagccggaaaccaggcgaccaatggcaagcatcaggtaagacgaagagagcgtgaacatggcgttgccaatgacgcacaacgccaccagaaacaacaagatatgtttgagtgagtagcggctggaaaagagtgcgatgattggcgcaccgaccaccacccccagtgcataatacgagatcatatgcccggcagcaggaatcgaaattcctacgttatgcgccagctccgtgagcacgcccataatgccaaattcggccatccccaaaccaaacgtgcccagagccaaagataaaatgacttttttcataccaccatcacaaccaccagaacggctaccaatcaccgtagccaataaagtgatagcttgcaggataacgaccagcaaggccaagagataattcgcccctctgtattcattatcctgctgaatagttatttcactgcaaacgtactttccagtttgctgtagcccaggccgttgatcttcttcactttgatctgcacaggaatacgctctttcatcgcttcaacgtggctaatcacaccgatggttttgccactggcgttcagggcatccagcgcatcaagggcggtatccagcgtttcgctatccagcgtgccaaaaccttcatcaaggaacagcgagtcaatacgtgttttatggctgaccagatccgaaagcgccagcgccagcgccagactaacgaggaaactttcgccgccggaaagggtacgggtatcgcgtactgcatctgcctgccaggtatcaacaacctcgacttccagcgcctcgctggctttgcgctgtaacagatagcgcccgtgcagccgggtaagttgctgattagcgagatggactaaattatccagcgtcagcccctgggcaaacttgcggaatttatcgccctctttggaacctattagcgaattcagatatccccagtcctcaacctgctgcgtcatttgagcaatttgctgcagtaaggtttgttgttgctgacggttatctgcatcctgcttcagctgctggcgaatctcgccttgactcgtggtgttttcacgcaacttttggtgagtttgcgctaactcttgctgaatctgctccaccgtcacagtgagagccaacccgtcaggtcggtgttgttgatgctgtgccagcgtttctgctgtctgtgtgaccagcgtttgcgcctgacggcgctggttttccagattctgcttgagctgttccagctgcgttagtgtttgttcatccattagcgccgcaaggaacgcctgctgatcgtcaaagacgctggcctgtagcgcggtgtcaaactgcgcctgggctttttgcagactttgcgccgccagaacatcctgttgctgtaacgtctgctgctggctgtgtaatgcgagacattgttcatgaacctgccgccagttatccagcgccacagtttcttcgctgtgcgggagatcatcactttgcggcaacgtttccagaatcggcgtcagctgctgaatacggttttgcagcgcggttaattcgttctggcgttgctgccagctctgcgcttcttgctgacgtgtcgccaaccagctctcttcttcatcttcctgtggcaatgtcagtgcataacccgtcaatgccgttaagagctgctgctggcgttgttcaatttgctgttgatactggataatttgctgattatgcgcggcaatctgcccttgtaattcatgtcgttggctgagtaaccgcagctggcgttcgtgctcatcttgtgcatccagccacggttgaatatcgtcctgtggctgcaaggtgatattgaggctggtcgtgacggcttgccattgttgagtaagtgcttgctcatcttgtcggaggctttgcgcttcgttttcatcgcgctgaagctgcttcgttaatgcatccagttgcccgcgcagcgccgcaccttcttcgccgagctttttaacttcgttttccagcgtcagtaatcgagactgattaacaccaggctccagcgcctgatacgcctcgaccgccgggtggctggtggaaccacaaagtggacaaggttgacccgcctgtaactgtgcacgttgagcttccagcgttttgatgcgcgcttcttgctcgcaaatggttttcacatcggcaagttgctgcgtcttttctttataacgctggcgcatttcgttaagtgcgacattacgttgcgtctgttccagagtgacattctggatagtgaccattaactgcgccagacgtttttgttggggaacaatctgcccatgcagcgcgaccaggcgctgacgcagtgggcgttgctcggaatgttgcgccagggcgctagcaacttcatcggcggttaacgtcaacgtgatcgccgcaagcgcattaagtttttgctcagcatgggttaactgttgctgccattgccgcagatgctcgcgatcgctggtttgttgggagaactgcgcacgccaacccgccagttcgttgttccactgacggaagcggtcgtgttcctgtaaccaggtattcaggctttgttgctgctgctgtaattctgctgactgcttcgccgcgtggtggcgaatgctcgcgcgaagcgccattgtgctctgtaagcgagtatttacttcttcaatctgctggcgaatatgcgccagcgccgcgctgtgttctgcgatgcgttcccagtgtggacgaagatttcgtgccggttgtgccagactaagcgccgccagttgaggttgcgctttttcttcttcggctaacgcctgttgcaaggcctgctgacggcggctggcttcttgctgcaattcgtcctgacgcgttaaccagtttagcgattgttgttcttgctgctgcgcggtaattaactgtttttcttcgtcagtaagtacctgcaaactcgctgtcagcgattgcacttgttccggcgtgagcaacgtgacgccgctggcctgcgcttgcagcttctccagctctgtgcgggccgatttgtgctgctcaaaaaccatcgccgagatttgcccgtagatttcagtgccggttaactcctcgagcaattccgcgcgttctttgggtttggcattcaggaaggcagcaaattgcccctgcgaaagcagcatcgaacgagtgaagcgcccgtaatccagcccggttaacgtcgctgtcagttccagcttatctttcactttgtcggcgagaattttgccgtcggcgcagcgcgccagctctacgcgtggcacctgcaaattaccgtcgggttggttacgcgcccgattctggctccagaatgcacggtacgcttcacctttcacttcaaactccacctccgccagacattcggcggtatcgcgggtcatgagatcattttgcgattgtgaaacgttagagagacgcggagtttcgtgatacagcgccagacaaatggcgtccagcagggtggttttccccgcacctgttgggccggtaatagcaaacagcccgttgctggcgaacggctcgcgggtgaaatcaatcttccattcgccttttaatgagttcaggtttttcaggcgcaggctgagaattttcatgcttcgtgttctccggcgagggtatgcaacgtcgtggtgaaaagatgctgcagacgttgctgctgcgattcatccagttcttccagtgccagacggcgattgaacacctcttcgacgctgagttcgctgagggtttcacgctgttggctggctaacacacgctcgcgctgttcacgactccgacgtaccagcaatacttcgacaggcaatgattcggttaatgcctggattttgcgctgaatatcatgcagatactcatcagtagtgatttcgatatccagccagacaggtggctcctgcgatacatcgcgccactgttccagctgtgcggtaatcgacgccagatcgcctttcagcactgccatgggttgcgttaccggtacgttcaggttttccacgctctctaatttgccgtttgaaaatgtcaccagatggacatatttactcttaccgcattcatcaaaactcagtggaatgggggagccgcaatagcgaacatgttccatgccgccaataatctgtgcgcggtgaatatgcccgagcgcgatgtagtcggctggtggaaagttttgtgccggaaacgcgtccagcgtgccaatataaatgtcacgcacggcgtcacttttactggcccccacggtcgttaaatgtcccgtggcgatgatgggcagaggctgatcgccgcgcagtttgcaggcatcggcatagtgttgttggtaataatcggtaatcgctgccagtaaatgctgctgtttttcaataccgttaagccccgcctggctggtaataatgtcacgcggacgtaaaaacggaatggggcacagcactgcgcctggcgtcccgtcgcgacgaggcaagatttgcggcgcatgtccggcgctggcgaccacggtagtattgaggaacgccatgatatcgcgcgattcattcagcgtggcgaccgagtcatggtttcctgccagtaccaccagatgacagccagtttgctgtaaattgacaacaaaacggttgtataacgtgcgggcgtaactgggcggcgagccggtatcgaaaacatcaccggcaacaataatcgcatccacctgatgggtttgtgctgtctccagcagccagtcaagaaaagcctgatgttcagcttcgcggcttttactgtagaagttctggccgagatgccagtctgaggtgtgaaggatgcgcataacggttccctggcgaaaaagcatgggcgcgattatacccaaacagatgtgccatttgcttttttctgcgccacggaaatcaataacctgaagatatgtgcgacgagcttttcataaatctgtcataaatctgacgcataatgacgtcgcattaatgatcgcaacctatttattacaacagggcaaatcatggcgagacgtattctggtcgtagaagatgaagctccaattcgcgaaatggtctgcttcgtgctcgaacaaaatggctttcagccggtcgaagcggaagattatgacagtgctgtgaatcaactgaatgaaccctggccggatttaattctccttgactggatgttacctggcggctccggtatccagttcatcaaacaccttaagcgcgagtcgatgacccgggatattccagtggtgatgttgaccgccagaggggaagaagaagatcgcgtgcgcggccttgaaaccggcgcggatgactatatcaccaagccgttttcgccgaaggagctggtggcgcgaatcaaagcggtaatgcgccgtatttcgccaatggcggtggaagaggtgattgagatgcagggattaagtctcgacccgacatctcaccgagtgatggcgggcgaagagccgctggagatggggccgacagaatttaaactgctgcacttttttatgacgcatcctgagcgcgtgtacagccgcgagcagctgttaaaccacgtctggggaactaacgtgtatgtggaagaccgcacggtcgatgtccacattcgtcgcctgcgtaaagcactggagcccggcgggcatgaccgcatggtgcagaccgtgcgcggtacaggatatcgtttttcaacccgcttttaacgccttgctcatcggacgcagagcagggcttatgatttcttaacgggagtatcttacgtgctggaacggctgtcgtggaaaaggctggtgctggagctgctactttgctgcctcccggctttcatcctgggtgcattttttggttacctgccctggtttttgctggcatcggtaacaggactgcttatctggcatttctggaatttattgcgcctttcatggtggctgtgggtggatcgcagtatgaccccgccaccggggcgtggtagctgggaaccgctactatacggcttacaccagatgcagctgcgaaataaaaaacgccgccgtgaactgggcaatctgattaaacgctttcgtagcggcgcggagtcgctgcccgacgcggtggtgctgaccacggaagagagcggtattttctggtgtaacggtctggcgcaacaaattcttggtttgcgctggccggaagataacgggcagaacatccttaacctactgcgttacccggagtttacgcaatatctgaaaacgcgtgatttttctcgcccgctcaatctggtgctcaacaccgggcggcatctggaaattcgcgtcatgccttatacccacaaacagttgctgatggtggcgcgtgatgtcacgcaaatgcatcaactggaaggggcgcggcgtaacttttttgccaacgtgagccatgagttacgtacgccattgaccgtgttacagggttacctggagatgatggatgagcagccgctggaaggcgcggtacgcgaaaaagcgttgcacaccatgcgcgagcagacccagcggatggaagggctggtgaagcagttgctaacgctgtcgaaaattgaagccgcgccgacgcaattgctcaatgaaaaggttgatgtgccgatgatgctgcgcgttgttgagcgcgaggctcagactctgagtcagaaaaaacagacatttacctttgagatagataacggcctcaaagtgtctggcaacgaagatcagctacgcagtgcgatttcgaacctggtctataacgccgtgaatcatactccagaaggcacgcatatcaccgtacgctggcagcgagtgccgcacggtgccgaatttagcgttgaagataacggaccgggcattgcaccggagcatattccgcgcctgaccgagcgtttttatcgcgttgataaagcgcgttcccggcaaaccggcggtagcggattagggttagcgatcgtgaaacatgctgtgaatcatcacgaaagtcgcctgaatattgagagtacagtaggaaaaggaacacgtttcagttttgttatcccggaacgtttaattgccaaaaacagcgattaatccgcctttgtcatcttttattgccataagccagtcgatgctggcttattttctttgcagtcaaaatacgggcgttagattttacaacggttggtgattttttgttcgcatgattagccatgtctttttcacggaaatagtgttttatactggttggtgatttcttatcgctatatacctctggtttttagatccctccttgctttaaaacgttataagcgtttaaattgcgcttcaggtgctgtcatactgactgcattaacgcggtaaatcgaaaaactattcttcgccgcgcctggttgggagtatttcccgctaaaattgtttaaatataccgctgtatcatccccagggattggcacaaaaatttaacgttacaacaccacatccacaggcagtatgatttatgacccatcaattaagatcgcgcgatatcatcgctctgggctttatgacatttgcgttgttcgtcggcgcaggtaacattattttccctccaatggtcggcttgcaggctggcgaacacgtctggactgcggcattcggcttcctcattactgccgttggcctgccggtattaacggtagtggcgctggcaaaagttggcggcggtgttgacagcctcagcacgccaatcggtaaagtcgctggcgtgctgctggcaacggtttgttacctggcggtggggccgcttttcgctacgccgcgtacagctaccgtttcctttgaagtggggattgcgccgctgactggtgattccgcgctgccgctgtttatctacagcctggtctatttcgctatcgttattctggtttcgctctatccgggcaagctgctggataccgtgggcaacttccttgcgccgctgaaaattatcgcgctggtcatcctgtctgttgccgcgattgtctggccggcgggttctatcagcacggcgactgaggcttatcaaaacgctgcgttttctaacggcttcgttaacggctatctgaccatggatacgctgggcgcaatggtgtttggtatcgttattgttaacgcggcgcgttctcgtggcgttaccgaagcgcgtctgctgacccgttataccgtctgggctggcctgatggcgggtgttggtctgactctgctgtacctggcgctgttccgtctgggttcagacagcgcgtcgctggtcgatcagtctgcaaacggcgctgctattctgcatgcttacgttcagcacacctttggcggcggcggtagcttcctgctggcggcgttaatcttcatcgcctgcttggtaacggcagttggcctgacctgtgcttgtgcagaattctttgcccagtacgtaccgctctcttatcgtacgctggtgtttatcctcggcggcttctcgatggtggtttctaacctcggcttaagccagctgatccagatctccgtaccggtgctgaccgctatttatccgccgtgtatcgcactggttgtattaagttttacacgctcatggtggcataattcgtcccgcgtgattgctccgccgatgtttatcagcctgctttttggtattctcgacgggatcaaagcatctgcattcagcgatatcttaccgtcctgggcgcagcgtttaccgctggccgaacaaggtctggcgtggttaatgccaacagtggtgatggtggttctggccattatctgggatcgcgcggcaggtcgtcaggtgacctccagcgctcactaaatcactgaacatttgttttaaccacggggctgcgatgccccgtggttttttattgtgttgatgggttaggaattgatggaaagtaagaacaagctaaagcgtgggctaagtacccgccacatacgctttatggcactgggttcagcaattggtaccgggctgttttacggttcggcagacgccatcaaaatggccggtccgagcgtgttgttggcctatattatcggtggtatcgcggcgtatatcattatgcgtgcgctgggggaaatgtcggtacataacccggccgccagctctttctcgcgttatgcgcaggaaaacctcggcccgctggcaggttacattaccggctggacctactgctttgaaatccttattgtcgccatcgccgatgtgaccgcttttggtatctatatgggtgtctggttcccgacggtgccgcactggatttgggtactgagcgtggtgctgatcatttgcgccgtaaacctgatgagcgtgaaggtcttcggggagctggaattctggttctcgttctttaaagtcgccaccatcatcatcatgattgtcgctggtttcggcatcatcatctgggggattggcaacggcgggcaaccgaccggtattcataatctgtggagcaacggcggcttcttcagtaacggctggcttgggatggtgatgtcgttgcaaatggtgatgtttgcttacggtgggatcgaaattatcgggattaccgccggtgaagcgaaagatcctgagaaatcgataccgcgtgcgattaactccgtgccgatgcgtattctggtgttctacgtcggtacgctgttcgtcattatgtctatctacccgtggaatcaggttggcactgccggtagcccgttcgtgctgacgttccagcatatgggcattacctttgccgccagcattcttaactttgttgtgctgaccgcttcgctatcggcaattaacagtgacgtctttggcgtaggccgtatgctccacggtatggcagagcagggcagcgcgccgaaaattttcagcaaaacgtcgcgtcgcggtattccgtgggttacggtgctggtgatgactaccgcgctgctgtttgcggtgtatctgaactacatcatgccggaaaacgtcttcctggtgatcgcttcgctggcaaccttcgccacggtgtgggtgtggattatgatcctgctgtcgcaaattgccttccgtcgctgtttgccgccagaagaagttaaggcgctgaaatttaaagtgccgggtggggtagcaacgaccatcggcgggctgattttcctgctctttattatcgggttgattggttatcacccggatacgcgtatctcgctgtatgtcggtttcgcgtggattgttgtgctgttgattggctggatgtttaagcgtcgccacgatcgtcagctggctgaaaaccagtaatccttgcgttctgtaagccggttcaggaggaaatcctgatccggctattccgaaagttatccgcccccgtcctcctcccccaaatatccttcagatgatgagtgatcctgcattaggctatggcaaggtgatcagattttcatcacaggggaattatgatgttaaatgcatggcacctgccggtgcccccatttgttaaacaaagcaaagatcaactgctcattacactgtggctgacgggcgaagacccaccgcagcgcattatgctgcgtacagaacacgataacgaagaaatgtcagtatcgatgcataagcatcgcagtcagcagcagcctggcgtcaccgcatggcgtgcggcgattgatctctccagcggacaaccccggcggcgttacagtttcaaactgctgtggcacgatcgccagcgttggtttacaccgcagggcttcagccgaatgccgccggcacgactggagcagtttgccgtcgatgtaccggatatcggcccacaatgggctgcggatcagattttttatcagatcttccctgatcgttttgcgcgtagtcttcctcgtgaagctgaacaggatcatgtctattaccatcatgcagccggacaagagatcatcttgcgtgactgggatgaaccggtcacggcgcaggcgggcggatcaacgttctatggcggcgatctggacgggataagcgaaaaactgccgtatctgaaaaagcttggcgtgacggcgctgtatctcaatccggtgtttaaagctcccagcgtacataaatacgataccgaggattatcgccatgtcgatccgcagtttggcggtgatggggcgttgctgcgcttacgccacaatacgcagcagctgggaatgcggctggggctggatggcgtgtttaaccacagtggcgattcccatgcctggtttgacaggcacaatcgtggcacggggggagcttgtcacaaccctgaatcgccctggcgcgactggtactcgtttagtgatgatggcacggcgctcgactggcttggctatgccagcttgccgaagctggattatcagtcggaaagtctggtgaatgaaatttatcgcggggaagacagtattgtccgccattggctgaaagcgccgtggagtatggacggctggcggctggatgtggtgcatatgctaggggaggcgggtggggcgcgcaataatatgcagcacgttgctgggagcaccgaagcggcgaaagaaacccagccggaagcgtatattgtcggcgaacattttggcgatgcacggcaatggttacaggccgatgtggaagatgccgccatgaactatcgtggcttcacattcccgttgtggggatttcttgccaataccgatatctcttacgatccgcagcaaattgatgcccaaacctgtatggcctggatggataattaccgcgcagggctttctcatcaacaacaattacgtatgtttaatcagctcgacagccacgatactgcgcgatttaaaacgctgctcggtcgggatattgcgcgcctgccgctggcggtggtctggctgttcacctggcctggtgtaccgtgcatttattacggtgatgaagtaggactggatggcaaaaacgatccgttttgccgtaaaccgttcccctggcaggtggaaaagcaggatacggcgttattcgcgctgtaccagcgaatgattgcgctgcgtaagaaaagtcaggcgctacgtcatggcggctgtcaggtgctgtatgcggaagataacgtggtggtatttgtccgcgtgctgaatcagcagcgtgtactggtggcaatcaaccgtggcgaagcttgtgaagtcgtgctacccgcgtcaccgttgctcaatgccgtgcaatggcaatgcaaagaaaggcatgggcaactgactgacgggattctggctttgcctgccatttcggctacggtatggatgaactaacgttttataacgccttgtgtgacgcctgcgccatcatccgcggataaaactgccagaagcgggtttcgagggcgtcataatgagcgtctaaatcgtaccaggagtcacgcagggcatccagacgtgggcggcggcttgccatgccgtttaacacgttctggatgaaatccatatcgcgatagcgcaccagccactgctctgaccacaagtaattgttcagattgataaaacgtggcggtgagtccggcaaaatcgtcatcacttgctcgcgggcataacagacaaattcctgtagcggaaagtccggcgacagctgcgaccagtggcgggaaagaaagtgatcccacatgacatccagcgtaataggcgcaacgcggcgagtttcactacgaaaccattcccgtgcttcgcggacttccggcagattgtcggttaatacgtcgatacgtcgatgcatatgaatgccagccacgacgtcgggcggaaaactttcttcaggatttccgcgtacgaaatcagccagtaaattgccggaaagcgagctttccgcgagatgggctaaatgcaggtgagctaaaaaattcatcgattatattctatccaaaagggggtaaaggttgcagggagagcgccccggcactagactacccgcctcttattttagtctgagtcagtgtcatgcgcgttaccgatttctcctttgaattgcccgaatccctgattgcccactatcccatgcctgaacgcagtagctgtcgtttactgtcgctggacgggccgacgggcgcgctgacgcacggtactttcaccgatttacttgataagctcaaccccggcgatcttctggtttttaataatacccgcgtgatcccggcgcgcctgtttgggcgtaaagccagcggcggcaagattgaagtgctggttgaacggatgctcgacgacaaacgcattcttgcgcatattcgcgcctcgaaagcgccaaaacctggcgcagaactgctgctgggcgatgacgaaagtattaacgcaacaatgaccgcgcgccacggcgcactgtttgaagtcgaatttaatgatgaacgctcggtgctggatattctcaacagcatcggccatatgccgctgccgccgtatatcgaccgtccggacgaagacgctgaccgcgaactttatcaaaccgtttatagcgaaaaaccgggcgcggttgcagccccgaccgcaggtctgcattttgacgaacctttgctggaaaaattacgcgccaaaggcgtggagatggcgtttgtgacgttgcacgttggtgcgggcaccttccagccggtgcgcgtcgacaccattgaagatcacatcatgcactcggaatacgctgaagtgccgcaggatgtggtagacgcggtactggcggcgaaagcgcgcggtaaccgggtgattgcggttggcaccacctcagtacgttcgctggaaagcgcggctcaggcggcgaaaaacgatcttatcgaaccgttctttgacgatacccaaatctttatctatccgggcttccagtacaaagtggtcgatgcgctggtgacaaacttccacctgccggaatcgacgctgattatgctggtttcggcctttgccggttatcaacacaccatgaacgcctataaagcagcggtagaagagaaatatcgcttttttagttacggtgatgcgatgtttatcacgtacaatccgcaggcaattaatgagcgcgtcggggagtaattccgtggcgctggtttaaaacgttggactgtttttctgacgtagtggagaaaaaatgaaatttgaactggacaccaccgacggtcgcgcacgccgtggccgcctggtctttgatcgtggcgtagtggaaacgccttgttttatgcctgttggcacctacggcaccgtaaaagggatgacgccggaagaagttgaagccactggcgcgcaaattatcctcggcaacaccttccacctgtggctgcgcccgggccaggaaatcatgaaactgcacggcgatctgcacgattttatgcagtggaaggggccgatcctcaccgactccggcggcttccaggtcttcagccttggcgatattcgtaaaatcaccgaacagggcgtgcacttccgtaacccgatcaacggcgatccgattttcctcgatcctgaaaaatcaatggagattcagtacgatcttggttcggatatcgtcatgatctttgatgagtgtacgccgtatcctgctgactgggattacgcaaaacgctccatggagatgtctctgcgttgggcgaagcgtagccgtgagcgttttgacagtctcggaaacaaaaatgcgctgtttggtatcattcagggcagcgtttacgaagatttacgtgatatttctgttaaaggtctggtagatatcggttttgatggctacgctgtcggcggtctggctgtgggtgagccgaaagcagatatgcaccgcattctggagcatgtatgcccgcaaattccggcagacaaaccgcgttacctgatgggcgttggtaaaccagaagacctggttgaaggcgtacgtcgtggtatcgatatgtttgactgcgtaatgccaacccgcaacgcccgaaatggtcatttgttcgtgaccgatggcgtggtgaaaatccgcaatgcgaagtataagagcgatactggcccacttgatcctgagtgtgattgctacacctgtcgcaattattcacgcgcttacttgcatcatcttgaccgttgcaacgaaatattaggcgcgcgactcaacaccattcataaccttcgttactaccagcgtttgatggcgggtttacgcaaggctattgaagagggtaaattagagagcttcgtaactgatttttaccagcgtcaggggcgagaagtaccacctttgaacgttgattaatattaataatgagggaaatttaatgagcttttttatttctgatgcggtagcggcaacgggtgcaccggcgcaaggtagcccgatgtctttgattttgatgctggtggtattcggtctgattttctatttcatgatcctgcgtccacagcagaagcgcaccaaagaacacaaaaagctgatggactccattgccaaaggtgatgaagttctgacgaacggtggcctggttggtcgcgtaaccaaagtagcggaaaacggctacattgctatcgcgctgaatgacaccactgaagtagttattaaacgtgacttcgtagctgccgtcctgccgaaaggcaccatgaaggcgctgtaattaaaatttttccctaagggaattgccgtgttaaaccgttatcctttgtggaagtacgtcatgctgatcgtggtgattgtcatcggtctgctgtatgcgcttcccaacctgtttggtgaggatccggctgttcagatcactggtgcgcgcggagtcgccgccagtgagcaaacgctgatccaggtccagaaaacgttacaagaagaaaaaataactgctaagtctgtggcactggaagagggcgctattcttgcgcgcttcgactccactgacacccagttgcgcgctcgtgaagcattaatgggcgttatgggtgacaaatacgtcgtggcgcttaaccttgccccggcaacgccgcgctggctggcagctattcatgctgagccgatgaagctcggccttgacctgcgtggcggcgttcacttcctgatggaagtggatatggacaccgcgcttggcaaactccaggaacaaaatatcgatagcctacgcagtgacctgcgcgaaaagggcatcccgtataccactgttcgtaaagaaaacaactacggcctgagcatcactttccgcgatgctaaagctcgtgatgaagccattgcgtatctgagcaagcgccatccggacctggtgattagcagccagggcagcaaccagctgcgtgcggtaatgagcgatgctcgtctgagtgaagcgcgtgaatatgcggtgcagcagaacattaatatcctgcgtaaccgtgtaaaccaacttggcgtggcggagccggtggttcagcgtcagggtgctgaccgtatcgttgttgaactgcctggtattcaggacactgcgcgtgcgaaagagattctgggcgcgacggcaacgctggaattccgtctggtaaacaccaatgttgatcaggccgctgcggcatccggtcgcgtaccgggcgactctgaagtgaaacagacccgcgaaggtcagccggttgtgctgtacaaacgcgtaattctgaccggtgaccatatcaccgactccacttccagccaggacgaatacaaccagccgcaggttaacatctcgctcgatagcgctggtggcaacattatgtctaacttcaccaaggacaacatcggcaaaccgatggcaaccctgtttgtggagtacaaagacagcggtaagaaagatgcaaatggtcgtgcggttctggtgaaacaggaagaggtgattaacatcgccaacatccagtctcgtctgggtaacagcttccgtatcaccggcatcaacaacccgaacgaagcccgtcagctgtcactgctgctgcgtgccggtgcgttgatcgcgccgattcagattgttgaagaacgtacaattggcccgaccctgggtatgcagaacattgagcaggggctggaggcttgccttgccggtctgctggtttctattctgttcatgatcatcttctataagaagtttggtctgattgcgaccagtgctctgattgccaacttgatcttgatcgtcggtattatgtcgctgttgccaggcgcaacactgagtatgccaggtatcgcgggtatcgtcttaacccttgcggtagcggtcgatgcgaacgtactgatcaacgaacgtattaaagaagagttgagcaacggacgtactgttcaacaggcaattgatgaaggttatcgtggcgcattcagttctatcttcgatgcgaacatcaccacgctgattaaagtcatcatcctgtacgcagtgggtaccggggcaattaaagggttcgcgattactaccggtatcggtgtggcgacgtcgatgtttaccgcgattgtcggtacgcgtgccatcgtaaacctgctatatggcggcaagcgcgtcaagaagctgtcaatctgaggagtgcgatgtggcacaggaatatactgttgaacaactaaaccacggccgtaaagtctatgactttatgcgctgggactactgggctttcggcatctctggtctgctgttaatcgctgctatcgttattatgggcgtgcgcggctttaactgggggctggatttcaccggtggtacggttatcgaaattacgctcgaaaaaccggctgaaattgacgtaatgcgtgatgcattgcaaaaagccggttttgaagagccaatgctgcaaaactttggtagcagccacgacatcatggtccgtatgccgcctgctgaaggcgaaaccggcggtcaggtgctgggcagccaggttctgaaggtgattaacgaatccaccaatcagaatgcagcagtgaagcgtattgagttcgtcggtccgagcgtgggggcagaccttgcgcaaaccggtgcgatggcgttgatggcagcgctgctgtctatcctcgtgtacgtaggtttccgctttgagtggcgactggcggcaggggtggttattgcgctggcgcacgacgttatcattacgctgggtattttgtcgttattccatatcgagattgacctgaccattgtggcatcgttgatgtcggttatcggttactcgcttaacgacagtatcgtggtatcggaccgaattcgtgaaaacttccgcaagatccgtcgcggtacgccttacgaaatctttaacgtgtccttgacccagacgctgcaccgtaccttgatcacatccggtactaccttgatggttatcctgatgctgtatctcttcggtggtccggtactggaaggcttctcgctgaccatgcttatcggtgtttccatcggcactgcatcttccatctacgtagcatctgcgttggctctgaaactgggtatgaagcgcgaacacatgttgcagcagaaagtggaaaaagaaggggcggatcagccgtcaattctgccgtaatcaagttcccgttgatgttgaaaatcccggtcagaagatcgggattttttttgatgtatggagattgcgaaaatccccgcatcttgggaaactgcgcgtaaccctacatttcatccaggtaacttttcatggctatcatcccaaaaaactatgcgcggttagaaagcggctatcgcgaaaaagcattaaaaatctatccgtgggtctgcggtcgctgttcccgcgagtttgtttattccaacctgcgtgaacttaccgttcaccacattgatcacgaccataccaataacccggaagatggcagtaactgggaattgctttgtctctattgccacgatcatgagcattcgaaatataccgaagcggatcagtatggtacgaccgttatcgcaggggaagatgcgcagaaagatgtcggtgaagcgaagtacaacccattcgctgacctgaaagcgatgatgaacaagaagaagtgattaaaacgtaaaattgcctgatgcgctacgcttatcaggcctacgttatttcagcaatatattgaatttacgtgcttttgtgggccggacaaagcgtttacgccgcatccggcatgaacaaagcacacgttgttaacaatcagaaatgccgggaataaatcccggcattttcataatcagaagttgtaacctactaccaggtaaccaccccagccggtagagcgaacgttgaagttgccgttgccgaagttcagttctgcatcgtcgttccactgaccaccgtcgtgccagtaacgagctacgacagagtagtgccagtgatcgtagttcagagccagaatatggctggaagcgatagagttattagtacgggtcttaataccgttgattgcgttaccgctgtcatcccctaaatcggaaccccagtcgaagttggtgaagccgatgtagctcagctgaccgccccacagatcggtaatcggcacaaagtatttaattttgaaacggtaaccgtcccactcgttttcgttcgctgcgtcatagttctgccactggtatttcgcatagacgttcatggacaggctcatcggcagaccagtatcgatgtcggtacccagacccatgtaccaggtgctctggcgaccatctttattacgacccatgtcgtaaatgtagttgttcgcgaagtaccactctttgaacggaccgaagctaaggtcagtattggtcagcttgtcgatggagaaacgtggttcgatttccataaacagcggagaaccgtggttccagatacctttagcatcggagttaccgccgaagaataccggcgcatccgcataaccatagaagtcgaaccagtcttttttagcgaatgcttcgtactcaaggtaggtatcgttgcggatctgcggtccgaaacgggtgtgatagcttccgacaacgttaacgctctggtgccaccagtcggaaagatactgcggtttgtcgttttcagctgcgttgacagtaaaagacgaagagagcgccagtaccgcaccggctgccagtaatgtttttttcatatgtatgccactgtttgaaaatcccttgcgggagtgaaaaaggcgcaaattgcgtttctaaatatttcgtatacagaggagcctattataaaaatcattgctcacaaaaatatgtttcgtttcacagttctatcatttacgtaatcgattgcgttcacgtttacacacattcgggcggggattgtactgactttcgcccttgttgcaaacttttactatcaatccaggtgatgtaagcagagtaacaaaatgacggggaaagatgttgcgggacgcacaaaatcgtcccgaaatacgtttactgcataacaggttgaatgtcgtggatacgtacaaagcctaactgatccacagaaatcccctttaattgtaacggaatatcaacatcgctgggggcgaggacgctggcaggggcattaatcaattgattctgcacattgatttcctgaaagttgtctattgttccctgaatttgcccatattcaacagttccgctgaatgcgggcaagggatcattcgactcaccctgaatacgtagtgtaagggtggtgccatctgtatcaggcgtaatattcaccagcgacatacgtaaagtaccgatctggctttccagtcttgccggtgttttcgctccaggcagaaggtaaaccccactgctggattttgcattcagcctgttttgctgagtgattttgactgtttcttgattgagttgcgtcatctcctggttcagcgtgctgacgctgtgtttcatctgtcgcacttcactttgctgcacacaggcgctaaggctgaacaggcttcccagcaggagcagtcgaaaaacgttagtattcataggtcgtccctttctcgtcgcaattagcctaatggtagagggtaaaagcagcgaaagcatcgatcctttatctcaaaagcgttgcgcctttgttgtatcgtcagttcagggtaaaatagatttccgttaaccacctggtcaggacgccgtatgcattgcccattctgtttcgccgtggacactaaggtaattgactctcgtctcgtgggcgagggttcatccgtacgccgccgtcggcagtgtctggtgtgtaatgaacgtttcaccacctttgaagtggcggagctggttatgccgcgtgttgtaaaaagcaacgacgtgcgtgaaccgtttaatgaagagaaattgcgtagcggaatgctgcgggcgctggaaaaacgtccggtgagttccgatgacgttgaaatggcaatcaatcatattaaatcgcagctgcgcgccaccggtgagcgcgaagtaccgagcaagatgattggcaatctggtgatggagcaattgaaaaagctcgataaagtcgcctatatccgttttgcctctgtctaccgcagtttcgaagatatcaaagaatttggcgaagagatcgcgcgcctggaggactaagccgtgcaggacgagtattacatggcgcgggcgctaaagctggcgcaacgaggacgttttaccacccaccccaacccgaatgtcgggtgcgtcattgtcaaagatggcgaaattgtcggtgaaggttaccaccaacgagcgggtgaaccacatgccgaagtacacgcgttgcgtatggcgggtgaaaaagccaaaggcgcaacggcgtatgtgacactcgaaccctgtagccatcatggccgtacgccaccgtgctgtgacgcactcatcgccgctggcgtagcgcgcgtggtcgcagcgatgcaggatcctaacccgcaggtcgctgggcgtggactttaccgtctgcaacaggctggcattgacgtcagccacgggctgatgatgagtgaagccgagcaattgaataaaggctttctcaagcggatgcgcaccggctttccttatattcagttaaaacttggcgcatcgcttgatggccgcacggcgatggcgagcggcgaaagccagtggatcacttcgcctcaggcgcggcgcgacgtacaacgacagcgcgcacaaagtcatgccattttaaccagcagcgccacggtgctggcggatgatccagccttaacagtgcgttggtctgaactggatgaacaaactcaggcgctctacccgcaacaaaatctccgccagccagtacgtattgtgattgatagccaaaatcgcgtgacgccggaacatcgcattgtgcagcagcccggcgaaacctggttcgcgcgtacgcaggaagattctagtgagtggccggaaacggtgcgtaccttgctgattccagagcataaaggtcatctggatctggttgtactgatgatgcaactgggtaaacagcaaattaacagcatctgggtggaagcggggccaacgctcgctggcgcattgctgcaggcgggtttagtcgatgagctgattgtctatatcgcacctaaactattaggcagcgacgcccgcggattatgcacgctgccagggcttgagaaattagccgacgccccccaatttaaattcaaagagatacgtcatgtaggcccggatgtttgcctgcatttagtgggtgcatgatctcccggctcgaaagggaagcagcgcacgaaatattatgctaaaatccgcccccctgcggggccatactcgaacccgaaggaagaaaatgaacattattgaagctaacgttgctaccccggacgctcgcgtcgccatcaccatcgcgcgtttcaacaactttatcaatgacagcctgctggaaggtgcaattgacgcactgaaacgtatcggtcaggtaaaagatgaaaacattaccgttgtttgggtgcctggtgcctatgagctgccgctggcggcgggtgcactggctaaaaccggtaaatacgacgcggtgattgcgctgggtacggttattcgtggtggcactgcccactttgaatatgtcgctggtggtgcaagcaacggcctggcgcatgttgcccaggacagcgaaattccggttgcttttggggttctgaccactgaaagcattgaacaagcgatcgaacgtgctggcaccaaagctggcaacaaaggtgcagaagctgcactgaccgcgcttgaaatgattaatgtattgaaagccatcaaggcctgaaattagtaaggggaaatccgtgaaacctgctgctcgtcgccgcgctcgtgagtgtgccgtccaggcgctctactcctggcagttgtcccagaacgacatcgctgatgttgaataccagttcctggctgaacaggatgtaaaagacgttgacgtcctgtacttccgtgagctgctggccggggtggcgactaataccgcatacctcgacggactgatgaagccatacctgtcccgcctgctggaagaactgggacaggtagaaaaagcagtactgcgcattgcgctgtacgaactgtctaaacgtagcgatgtgccatacaaagtggccattaacgaagcgatcgaactggcgaaatcgttcggcgcagaagacagccataagttcgtcaacggcgtactcgataaagcagcacctgtgattcgccctaacaaaaagtgatatccaggccggtagattcacggaagaccgttccatgatcgtcggccttttcttttttacctgctgaggcataacgtatggcatgtggcgagttctccctgattgcccgttattttgaccgtgtaagaagttctcgtcttgatgtcgaactgggcatcggcgacgattgcgcacttctcaatatccccgagaaacagaccctggcgatcagcactgatacgctggtggcgggtaaccatttcctccctgatatcgatcctgctgatctggcttataaagcactggcggtgaacctaagcgatctggcagcgatgggggccgatccggcctggctgacgctggcattaaccttaccggacgtagacgaagcgtggcttgagtccttcagcgacagtttgtttgatcttctcaattattacgatatgcaactcattggcggcgataccacgcgtgggccattatcaatgacgttgggtatccacggctttgttccgatgggacgagccttaacgcgctctggggcgaaaccgggtgactggatctatgtgaccggtacaccgggcgatagcgccgccgggctggcgattttgcaaaaccgtttgcaggttgccgatgctaaagatgctgactacttgatcaaacgtcatctccgtccatcgccgcgtattttacaggggcaggcactgcgcgatctggcaaattcagctatcgatctctctgacggtctgatttccgatctcgggcatatcgtgaaagccagcgactgcggcgcacgtattgacctagcattgctgccgttttctgatgcgctttctcgccatgttgaaccggaacaggcgctgcgctgggcgctctctggcggtgaagattacgagttgtgtttcacggtgccggaactgaaccgtggcgcgctggatgttgctctcggacaccttggcgtaccgtttacctgtatcgggcaaatgaccgccgatatcgaagggctttgttttattcgtgacggcgaacctgtcacgtttgactggaaaggatatgaccattttgccacgccataaagatgtcgcgaaaagtcgcctgaagatgagtaatccgtggcatctgcttgctgtcggattcggaagtggattaagcccaatcgttcctggcacgatgggatcgctggcagcgattccgttctggtatctgatgacctttttaccctggcagctctactcgctggtggtgatgttggggatctgtatcggcgtctatctttgtcatcaaacggcgaaagatatgggcgtgcacgatcacggcagcattgtctgggacgaatttattggtatgtggatcacgctcatggcgctgccgaccaatgactggcagtgggttgccgccgggtttgtgattttccgtattctggatatgtggaagccgtggccgatccgctggtttgatcgcaatgtacatggcggcatggggatcatgatcgacgatattgtcgccggggtgatttccgcaggcatcctgtactttatcggtcatcactggccgctgggtattctgtcgtagttgtgcaccgatgcctgatgtgacgcttgtcacgtctcatcaggcctggactcttatttaaatcctacgaccgcatgcggtttatacggcgtttccagttcggcaatctgttctggcttcaaagtgatatccaccgcgttcagcagctcatcaagctgttcttcccgcgatgtaccgataatcggtgcggcaatgcccggtttactcaataaccaggccagcgcaacttgtgctcgtgttgcaccgagttcttcactgacgcccgttaaccgctctgcgatctgcgcgtcattttcatcgctttctttatagagatttttccccacctcatcagacaccagtcgtgcggtagtttctccccacggacgcgtcagtcgcccccgcgccagcgggctccacggaatcaccgccacgccctcctgataacacagaggcagcatctcgcgctcttcttcgcgataaatcagattgtagtgatcctgcatactgataaactgcgcccagccgtgctgtttttgtagcttcagggcctgagcaaactgcgaagcgtgcatggatgacgcgccgatataacgcgctttcccggcttttaccacgtcgttcagggcttccagcgtctcttcgatcggcgtgttgtaatcccagcgatgaatttgcaggatatcgacataatccatgccgagacggcgcaggctgtcgtcgatagagcgcaaaatttgtgcacgggataatccttccggtaaatcaccaacgcgatggaacactttcgtcgcaacgaccacgtcttcacgacgggcgaaatcccgcagtgcgcgaccaacgatctcttcgctgctgccatcggaatagctattggcggtatcaaagaaatttatgccgccttccagcgcgcgtttaatgatgggacggctactctcttccggcagtgtccatgcgtgattaccacgatctggctcgccaaaggtcatacagccgaggcaaagtcgggaaacgcgaaggtcggtttttcctaaggggttgtattgcatgctgccactcctgccatgaataatttcttaagcatagcaggagtggagtagggattatgccagccaggccttgattttggcttccataccggcggcatcgaggccgagttcggcgcgcatttcttcctgagttccttgtggaataaagaagtcaggcaggccaatgttcagcacgggtactggtttacgatgggccattagcacttcgttcacgccgctgcctgcgccgcccataatggcgttttcttctacggtgaccagcgcttcatggctggcggccatttccagaattaacgcttcatcaagcggtttcacaaaacgcatatcgaccagcgtagcgttcagcgattcagcgactttcgccgcgtctggcatcagcgtaccaaagttaaggatcgccagtttctcgccacgacgcttcacaatgcctttgccaattggcagtttttccagcggcgtcagttccacgccaaccgcgttaccgcgcgggtagcgcaccgcggacgggccgtcgttatagtgatagccggtatagagcatctggcgacattcgttttcatcgctcggggtcataatgaccatttccggtatgcagcgcaggtaagagaggtcaaaagcgccctgatgggtttgaccgtcagcaccaacaatgcccgcgcggtcgatggcgaacaggaccgggagcttttgaatcgccacgtcatgcagcacctgatcataggcgcgttgcaggaaagtggagtaaatcgcgacaatgggtttgtacccaccaatcgccagaccggcggcaaaggtcaccgcgtgttgctcggcgattgccacgtcgaagtaacgatccgggaatttacgtgaaaactcgaccatgccggaaccttcacgcatcgccggagtaatcgccatcagcttgttgtctttcgctgccgtttcgcacaaccagtcgccaaagatttttgaatagctcggcaaaccgccgctacttttcggcaaacaaccgctggagggatcaaatttaggcacggcgtggaaagtgatggggtctttttctgccggttcataaccacgaccttttttggtcatgatatgcaggaactgcgggcctttcaggtcgcgcatgttcttcagcgtggtgataagccccagcacatcgtgaccgtcaaccgggccgatgtagttaaagcccagctcttcaaacaacgtgccaggcactaccatgcctttaatatgttcttcggtacgtttgagcagctctttaattggcggaacgccagagaaaacttttttcccgccttcgcgcagcgaagagtaaagcttaccggaaagcagctgtgccagatggttattgagcgcgccgacattttcggaaatcgacatttcattgtcgttgaggaccaccagcatatcaggacggatatcgcccgcgtgattcatcgcttcaaacgccatgccagcggtaatcgcgccatcgccaatgacacagacggtgcggcgatttttgccttctttctcggcagtaaccgcaataccaattccggcactgatggaggttgatgaatgcccgacgcttaatacgtcatattcgctttcgccgcgccacgggaacggatgcagaccgcctttctgacggatggtgccgattttgtcgcggcgtccggtcaaaattttatgcggataagcctgatgccccacatcccaaatcaattggtcaaacggggtgttgtagacatagtgcagcgccacggtcagttcgaccgtgcccagcccggaggcgaagtgcccgctggaacggctcacgctgtcgagtaaatagcggcgcagttcgtcgcagagtttcggtaaactctctttcggcaacagtcgtaactcctgggtggagtcgaccagtgccagggtcgggtatttggcaatatcaaaactcatcaggggcctattaatacttattgtttatttattacgctggatgatgtagtccgctagcgcttccagtgccgaggtatcgagtgattgttcagccagttgtttcagcgactggcgggcatcgtcgatcagatcccgggctttcttccgggcttgctcaagacccagaagtgcagggtaggtacttttaccaagttgctggtcggcaccctggcgttttcccaacgttgcagtatctcccaccacatccaggatgtcatcctgaacctggaaggcaaggccgatgctctctgcgtacttgtcgagtactggcagagcacgacgccctttatctccggcgcttaatgcaccaaggcgaacggcggcgcgaatcaatgcgccggttttatgacgatgaatacgctcgagtgcgtccagaggtacgtgtttgccttccgcatctaaatctaatgcctgaccaccgcacattccggcaataccgctggcgcttgccagttctgaaatcatcgaaattctgtcgcggtccgacacttccggcatatcggcatcgcttaaaatcgagaacgccagcgtttgtaaagcgtcgccagcgagaatcgcgtttgcttcgccaaacttcacatggcaggtcggcaaaccgcgacgcagatcgtcatcatccatcgccggtaaatcatcatgaattaatgagtaagcgtggatacactcaacggcggcagcgggtgcgtccagcgtgtttgtgctaacgccgaacatatgaccggtggcataaaccagaaaaggtcgcaggcgcttaccacctaataatgcgccatactgcatggtttcgaccacgggagtgttctgaaagggcagtggggcgataaaacggctcagcgcctggttggcctgcttaacgcaggcttcaagttgctgcggaaagtccattactcattgtccggtgtaaaagggggtagagaggcgtcttcattgtcagacagcagaatttgtacgcgctgttcggcttgttgtaatttggcctgcccctgacgtgccagctgcacgccgcgttcgaactcgttcagcgcctcttccagcggcaggtcgccactttccagacgggttacaatctgttccagctcgctcagcgccttttcaaagctggcgggcgcctcatttttcttcggcataatgaatgtctgactctcaatatttttcgccccgtcatggtaacggactcagggcaaatagcaaataacgcgcaatggtaaggtgatgtgcgcagcaaagcgatgttagtggtatacttccgcgcctggatgcagccgcaggtgtgggctgctgtatttttccctatacaagtcgcttaaggcttgccaacgaaccattgccgccatgaagtttatcattaaattgttcccggaaatcaccatcaaaagccaatctgtgcgcttgcgctttataaaaatccttaccgggaacattcgtaacgttttaaagcactatgatgagacgctcgctgtcgtccgccactgggataacatcgaagttcgcgcaaaagatgaaaaacagcgtctggctattcgcgacgccctgacccgtattccgggtatccaccatattctcgaagtcgaagacgtgccgtttaccgacatgcacgatattttcgagaaagcgttggttcaatatcgcgatcagctggaaggcaaaaccttctgcgtacgcgtgaagcgccgtggcaaacatgattttagctcgattgatgtggaacgttacgtcggcggcggtttaaatcagcatattgaatccgcgcgcgtgaagctgactaacccggatgtaactgtccatctggaagtggaagacgatcgtcttctgctgattaaaggccgctacgaaggtattggcggtttcccgattggcacccaggaagatgtgctgtcgctcatttccggtggtttcgactccggtgtttccagttatatgttgatgcgtcgcggctgccgcgtgcattactgcttctttaacctcggcggcgcagcgcatgaaattggcgtgcgtcaggtggcgcattatctgtggaaccgctttggcagctcccaccgcgtgcgttttgtcgccattaatttcgaaccggtcgtcggggaaattctcgagaaaatcgacgacggtcagatgggcgttatcctcaaacgtatgatggtgcgtgccgcgtctaaagtggctgaacgttacggcgtacaggcgctggtcaccggcgaagcgctcggccaggtgtccagtcagacgctgaccaacctgcgcctgattgataacgtctctgatacgctgatcctgcgtccgctgatttcttacgacaaagagcacatcatcaacctggcccgccagattggcactgaagactttgctcgcacgatgccagaatattgtggcgtgatctccaaaagcccgacggtgaaagcggttaaatcgaagattgaagcggaagaagagaagttcgacttcagtattctcgataaagtggttgaggaagcgaataacgttgatatccgcgaaatcgcccagcagaccgagcaggaagtggtggaagtggaaaccgtcaatggctttggcccgaacgacgtgatcctcgatatccgttctgtcgatgagcaggaagataagccgctgaaggttgaaggtatcgacgtggtttctctgccgttctataaactgagcaccaaatttggcgatctcgaccagaacagaacctggctactgtggtgtgagcgcggggtgatgagccgtctgcaggcgctctatctgcgcgagcagggctttaacaatgtgaaggtgtatcgcccataatttgtggtttttacgtcgcatctggtcagatgcgacgtttgccgcatccgacactactcgtaataattataaatccctgccgccatcaccagttgtgatgccacttcatgggctttctcgcgcccaaccagcaggtcgataattttcagaccaaaatcaatagccgtacccggcccctggctggtcagcaattttacccgtgcatcccagacgacgcgcttgtcctgccattgttcggcgggaattttgtctttcagcgtcgggaagccggtcatattgccaatcgggaagatatcgtgcggtaccagcacggtggctggcgcggcgcaaatagccgcgacgatacgcccggaacggtggaactgtttaacggtttcaaccagcagggtactatcgcgaaaacactctgcgcctttaatgccaccaggcagtacgatcacgtcatattcgccatcagccacctcgaccagcggcgcatccgccagcagcttcacgccgcgcgagcaggtaatggccaggttgccatcgctggcgacgctggcagtggtgactttgataccgccgcgaaccagcagatcgatagtggtgacggcttcagtctcttcactaccaggggcgaggcaaaccagtgccgatgcgctcatattcactctcctttctttttaccatttcaaacaggcgggtgttttccggtacggcaatcccatgcgcgcgggcgcggcgtaagagaaaaccattgatatagtcgatttcggtgtggcgcagcgcgcggatatcctgcaacatcgacgagatattttccgctgtggcatcaatcacctgcatcacgtaatcacgcaaatcttctgctgaagtatgatgcccttcgcgctcgatcactgccgcgacttcttcgcatatctgcataatttcttgcggatgatgacgtaattcaccattcgggcaattccagatggcggtcagtggattaatcacacagttgacggccagcttgcgccacagctcggcgcgaatattgttatgccaggcaacgtcaggcaacacggtttgcaaaatatccgccagatagctgtaatcgccgtcctgttgccgtgccggaccaatatgcgtgattccgtttgccacatgaataatgacattgccgtcgcggcgggcggcatgggtggtggtgcccatcagtaatggctgctgaatgttttgcaactcttcgatggtgcccatgccgttgtgaattaacagtattggcgtggttacaggcagtgtggacgcgaggcttttgacggcatcggaaacctgccatgctttcagcgtcaccaggagcagatcgctggtggcaagaaaatcgggatcgttggcggtcagcgattcgttaaatatcgaaccatcagtctcaaccagattcacactacaataaggttgcggtacgcgcagccagccctgaacttcgtgaccctgtttacaaagtgctgtaagccataattgccctaaggcaccgcatcccaatacggtaattttcattgttcctcctcacccgcaaccactccgggtgttcaataaggctatcccttaattgtgcatgctgttgtgactatgcacaattaagggatacgtcctggtgcaggactgtcggttatttaactttgcgggtattatgcttcgcatcaaaaatgaagggagaggaaaagatgccatctttcgatattgtctctgaagttgatcttcaggaagcacgtaacgcggtcgataacgcgagccgcgaagtggagtcccgttttgacttccgtaatgttgaagcctcatttgagctgaacgacgccagcaaaaccatcaaagtgttgagcgagtccgatttccaggtcaatcagttgctggatattctgcgtgccaagctgctgaagcgcggcattgaaggcagttcactggatgtaccggaaaatatcgttcatagcggtaaaacctggtttgtggaagcgaaactgaaacagggcattgagagcgcgacccagaagaaaatcgtcaagatgattaaagacagcaaactgaaagtgcaggcgcaaattcagggcgatgagatccgtgtgactggcaaatctcgtgatgatttgcaggctgtcatggcgatggtacgtggtggcgatctcggccagccgttccagttcaaaaacttccgcgattaatcgcgacaatgtgcgttttgttcatgtcagatgcggcatgaacgcctgattcggcctacaacggtttgtaactcaagaactttgtaggcctggtaagcgtagcgcagcaggcaattcgccgcgttttttatgcctgacgaattgcctgttcaacctcaaagcgatttgtcactttgctgtcgattttcacataagctgaatgctcttcttctgcaatcaacacttctttgacgccttcagtttccagcaaacgcacttttaacgcttcgtttgcggcaatgtccgccgggatttcaatgcgcaaactgctgacatacggcggttctttcatggtactggcgactgccagccacactgcggccagcattgcgccagcgagaaataccccctgaccgtcaaacatgccgtcaatccagccgcccagcgaaccgccaatcgccacgccaagaaactggctggtggagtagacacccatcgccgtacctttgtaacctgctggcgactctttactgataagtgagggcagaagggcttccatcaaattaaacgccacaaagaaaagctgcacgccgaccaccagttgccagaactgcgtttgtgcgttccacaacacaatttccgcaaccacgatcaacccgacgcagaagacaaagacttgcttcattttgcgcttaacttcagcgtagataatgaaaggcacgatcgagccaaaggcgattaacatcgtcgccagatagaccttccagtgttcagccgccgggaaccccgcatcagctagctgtccgggcagggcaacaaacgtagacatcagaagcatgtgcagacacataatgccaaagttgagtttcagcagccgcggttccgccagcactttactgaaactgcctttcaccattccggactcacgattaagtacgtgagtgctactgttgggcacaacccaaatggtcaacgcaatgccggttgttgccagaatagcgatcatccagaacagcgcgtgcagcccaagtttgtgagtgatgatcgggccaagcaccatcgcaatggcaaaggtaatgccaaagctcacgccgataaacgccatcgctttggtgcggttttgttcgcgcgtgagatcggaaagcagcgccataacggcggcggcaattgctccagagccttgtagcgcccggcccagaataattccccagatggagtcggaaagcgcagcgataacgctaccggcggcaaacaccgccagcccaccgacaattaatggtttgcgaccaatgcggtcggaaagcaggccaaacggaatctgaaaaacggcctgagtcagaccataaataccaatggcaataccgattaatgcttcgctggcaccttgcagagccatgccgtacgtggtcagaaccggcagaaccataaacatgcccagcatgcgcaacgagaatacggtccctaaaccccaggtcgcgcgcctctcacctggcgtcattttataatcgttcattaccaccccttaaaaaaatgcccacatagtgtagtgcggagcgcatgttgggtaaacagagtgggtgatgctgccaacttactgatttagtgtatgatggtgtttttgaggtgctccagtggcttctgtttctatcagctgtccctcctgttcagctactgacggggtggtgcgtaacggcaaaagcactgccggacatcagcgctatctctgctctcactgccgtaaaacatggcaaatgcagttcacttacaccgcttctcaacccggtacgcaccagaaaatcattgatatggccatgaatggcgttggatgccgggcaactgcacgcattatgggcgttggcctcaacacgattttacgtcacttaaaaaactcaggccgcagtcggtaacctcgcgcatacagccgggcagtgacgtcatcgtctgcgcggaaatggacgaacagtggggctatgtcggggctaaatcgcgccagcgctggctgttttacgcgtatgacagtctccggaagacggttgttgcgcacgtattcggtgaacgcactatggcgacgctggggcgtcttatgagcctgctgtcaccctttgacgtggtgatatggatgacggatggctggccgctgtatgaatcccgcctgaagggaaagctgcacgtaatcagcaagcgatatacgcagcgaattgagcggcataacctgaatctgaggcagcacctggcacggctgggacggaagtcgctgtcgttctcaaaatcggtggagctgcatgacaaagtcatcgggcattatctgaacataaaacactatcaataagttggagtcattaccaacagagtgttaatgagaaaatattacagaggagagtaatttgtgtgtcaggtatgtttttttgcattcataaaatgaatgctctatatgttgaaaaaatgaattttaaaactaaatagttttacatcaaaaaagtaataatatcatttcttgattgccatgtgcattttttatcttacgaatatgctagttttatctcactaaataaacgatttggtgacatggatgataatgtttcaggctaaatgtgtgcttattacttggacctttatggcactgtatttattcattaaatggatatttggtggttaattattatggaaatatatgacagtgaggacataaaggtatacatgttaactaaaagaatattattttctgtaatgctgatagtttcaccaagcgtggtggccagcgagaaagcgcatgaattgtatgacagcatatacggtggtaaacctgctcccgatgttataaatacactgcataaaatggctgaatcgggagatatcgacgcgcagagcctgttaggctgggaatattatcagcctcgttatgataccaaacctgatgttcaggaagcgattaaatggttcgagttagcggctaaacaaggtgacagagaagctccgttagcgctggggggtatctactacgacggtgagcaggtgcgggtggattatgccaaagcgtatgcactatttaatcaggccgcgcagcacggtgtgaatttagcatggtccaggttgggcaggtaatgactccaacttattgatagtgttttatgttcagataatgcccgatgactttgtcatgcagctccaccgattttgagaacgacagcgacttccgtcccagccgtgccaggtgctgcctcagattcaggttatgccgctcaattcgctgcgtatatcgcttgctgattacgtgcagctttcccttcaggcgggattcatacagcggccagccatccgtcatccatatcaccacgtcaaagggtgacagcaggctcataagacgccccagcgtcgccatagtgcgttcaccgaatacgtgcgcaacaaccgtcttccggagactgtcatacgcgtaaaacagcgagcgctggcgcgatttagccccgacatagccccactgttcgtccatttccgcgcagacgatgacgtcactgcccggctgtatgcgcgaggttaccgactgcggcctgagttttttaagtgacgtaaaatcgtgttgaggccaacgcccataatgcgtgcagttgcccggcatccaacgccattcatggccatatcaatgattttctggtgcgtaccgggttgagaagcggtgtaagtgaactgcagttgccatgttttacggcagtgagagcagagatagcgctgatgtccggcagtgcttttgccgttacgcaccaccccgtcagtagctgaacaggagggacagctgatagaaacagaagccactggagcacctcaaaaacaccatcatacactaaatcagtaagttggcagcatcaccggttgggcattatgtacgccaatggtcagtatgttgaggtagattgtaagaaagcgaaggaatatcttgataaaggtgtccacatttatggtggcccggaagactttctggctacttgtcgaaaagacatgattgacagaaaaacggttgacgatacgttacccgtgattacggttacccgttctgggatgcgagataattttttagataaaggtttttcctgcatggatagcctcttcgccaccaccaataaattaggcgaagtggccaatcttcgcgtgacattcagcattcgtcgcccatccggtaaggagattaaccaaacggttggcttcgcgcctttcggtttaaaccggctgaatattagctttactgattacctatttggttcatttaccagtaattcgtctcttattctttataaaccggaatttgagcgaaaatcttgtgcaactgtaaggaccacaatcgttgccgcaacggcaaccattaacggcaaggatgtggagttgctgaaagcgggggcaattgaacaaaagtggtaacgctgctcagcccccggctaaggcaaaacttgccctggcgggtggcgataataatctaagccgcgagaatatgctgaatcgccaaaaacataggtacagcaccaaaagcatttggtgtcgctgaaagctgaacaaagccgagacgagcataaaaattaatggcggcagggtcagcatcaagataaacccctttaattggtaatgcctggtgaattatttttacatgttcaaaaaaatcacatagtaggtcctgaccaaagccccgcttttgatacttccgtgctacccccaacatgactaatctgacaacaccaatttctgaaggttgtgaaccctgaaggacgccagaaacgcgttgtttttccagcgaatatgccgtaaaagtacagatgccgatcagttcaccactttgtctgtcaataagtgctttagccgcacagtcgctattacgcacacttttctttagcgatgcgcgtacaaatttatcgataacagagttaccgcaatcaaactgtttttgcccaggataagtaatatcagactgataattacaggagaggactatgggcagagtaatctcttcatgcttgtcgaccatcgctgtttttccttttcattaacgccttgagggcgagcgtcggttgagcaggttcagcgatgagttggttcatcagttcccagctttgattcgaaagctcacggcgacgttggttatcaagcacactttcggcgcgttccatagcagcgctcaaaataaaagcgcttaaatctaccccaacggcttgcgcagcttcacgaagtttgtttttggcgtcgggactagttttgagttcgacccgcgcatttttcagcgttttatcgacatcgggtagagtggctgtttttccaggcattatgacctctttgattaactgaatgaaatcgtagggagtcgatctcatacataatacggctatcaaccgtatgattaatttatgttcatctgctcactctgtcaagacatacggttattagccgtatctctgatctcagacaataaaaaaggtgccgtagcacctttttaatagagaggttgtgttaccaaacagcagccagcagcgtatgcgagtccggcaccataaaatcaacggacatcatcaccgagagggctgtgatggcgatgatagagaagccgaacagcttgcgcgcccagatcctgtcatcagcaactttataaccgcgcagggccatacctaaccaccagacgctcaccgccgcggcgaccaccagatatttatacccagcgtaaccgccaagagagagcatcagcgtggcaacggcaaaggcgatgatatacagcgtgatgtgattcttcgccaccgaaatgccttttaccactggcaataccggaatgtttgccgcctgataatccttaaagcggaaaatggcgatggcataggagtgaggcatctgccacaggctgaagatagccagcaggatcgctgcgccgctatcgaactcgccggttactgcacagtagccaatcaccggcggcgcagcgccggagagcgaaccaatcaatgtgccgtagaccgagtggcgtttcatgtacaggctataaacgccgacataaaccacaaagcccatcacccccagccagcaggccagcggattcgcgccaaaccacagcagcataaagccagcaaagcctagcaaggtggcgtacaccagcgagacagcaggagagatcaggcctttaaccagcacccgattcttcgtcctttccatctttctgtcgatatccctgtcgatgtagttgttaaacacacaacccgacgccacaaccagtgacaccccaaccagcgtgtagataaacaggggataatcaatgctgccctttgaggccagcaggaatcccccaatcaccgagatcaggttgccaaagatgatgcctggtttcgttacttgcaggtattgcttaaacatcataaccgccgctcttagtgcatcatcatgttgtagttgaggttccacataatccagatggagcctacaaccaggatagcgatgattagcacggtgaagacaaacgccgtcatgttccagccttcatctgatttggtattcatgtgcaggaagcacaccagatgcaccagaacctgtaccactgccattgccaggattgttcccagaattacggccggagaggcagctcctgtcatcaccatccagaacggaatcaccgtcagaatgatcgacaggataaagcctgtcatgtaggtttttacgctgccatgggacgcgccgctgtgatcggtagaatgactcattacatcgcccccatcagataaacaacagtgaacacacagatccaaaccacatccaggaagtgccagaacaggctcaggcacatgatgcgggtacggttagtgctggtcaggccgcgacgagcgatttgtaccatcagcaccgccatccagataagaccggaagtgacgtgcagaccgtgcgtgccgaccagcgcaaagaacgctgacaggaagccgctgcgatccggacccatgccgttaacaatcaggtgatggaattcgtagatttccatcccgataaatccggcaccaaacaaccaggtcaacgccagccaggagataacctggcttttgttgtttttgtacatggcgatagccgccatgccgtaggtgatggagctgaacaacagcaagaaagtttcaaccagaacgaacggcagttcgaaaatgtccttacctgtcgggccgcctgcggtgccgttcaccagaacggcataggtagcaaacaagattgagaacagaatgcagtcgctcatcaggtagatccaaaatccgaagattttggttccgcctgcatcgtggtgcccgtgttcgtgcgcgtgggcagtcgcgtgcgtcaaagtatcagttgccatttttcagccctgccttagtaatctcatcgaaatgctggttttccagtttttcgatttctgccaccggcacgtagtaatccacgtcctcgtcgaagcttttcacgatccaggtgatgatcatgcctgcgaagccaacaatcgccagccaccagatatgccagatcatggcgaaaccgaagatggtggagaaagctgcaatgacgatacctgcaccgctgtttttcggcatatgaatttcttcatagtggtcaggctttttatacgcttcgcctttctctttcatttcccagaatgcatcacgctcgtgaacgtgcggcacaacggcaaagttatagaacggaggcggggaagaggttgcccactccagcgtacggccaccccacgggtcgccagtcaggtcacggttctggtcgcggtcgcgaatagaaacgtacatctgaataacgaggcagagaatacccagcgcaatcagtactgcaccgctagctgcaatcatcagcatggtgtggaactgcgggtcaatctgctggctcaaacgacgggtcatgcccatgaagcccagcgcatacagcggcataaaggcaacgaagaagccgatgatccagaaccagaacgcgcgtttaccccaggtttcattcagtttgaaaccgaacgctttaggccaccagtaggtcatccctgcgaagcagccgaagaccacgccgccgatgataacgttatggaagtgcgcaatcaggaacaggctgttatgcagaacgaagtccgcgcccggtactgccagcagcacgccagtcatcccgcccaccgagaaagtgacgataaaaccgatggtccacagcatcgcagaatggaacacgatgcggccctgatacatggtgaacagccagttgaagatcttcaccccggtcgggatggcgataatcattgtggtgataccaaagaaggcgtttacgttcgcgcccgcacccatcgtaaagaagtggtgcagccaaacgatgaacgacagcacggtgatacagacggttgcccataccagcgaggtataaccaaacagacgtttacgcgagaaggttgccgcaatttcggagaacacaccgaaaacaggcaggatcaggatgtaaacttccgggtggccccaggcccaaatcaggttgatgtacatcatcatgttgccacccatatcgttggtaaagaaatgggtgcccagatagcgatccagggtcaacaacgcgacggtaaccgtcagaattgggaaggaagcaataatcagtacgttcgcgcacagtgatgcccaggtaaatactggcatcttgaacatggtcatgcccggtgcgcgcatcttcagaatggtaacgaagaagttgataccggtaagcgtcgtacctataccggatagctggagactccatatccagtaatcgacaccgactcccggactgtactctattcccgatagcggtggataggccagccagccggtctgcgcaaattcgcccacgccgagagaaacgttaaccagaatcacaccaacaacagtaaaccagaagcttaagttgttgaggaacgggaacgcaacgtcacgcgcgccgatctgcagcggaaccaccaggttcatcagaccgataacgaaaggcatcgccacgaagaagatcataatcacgccgtgcgcggtgaagatctgatcgtagtggtgaggtggcaggaagcccgcttcgcccgccgaggcaagagcctgctggctacgcatcataatggcgtcagcaaaaccacgcagcaacatcacaatcgccacgatgatatacatgataccgaggcgtttatggtcgacggaggtcagccactctttccacaggtaggtccacttaccgaagtaagtgatcaggccaacgagcgccagacctcccaaaataatgccagcgatcgtaaccatgacgataggttcatggaacgggactgcatcaagtgataattttccgaacatctttattcttcctcaacccctttaatgggcggattccgcgtggctcatgtccatgccttccataccttcgtgtgcactgtgctcaccttctggctgggtcatgtccatgctcttaccgtgagccataaacttgttaatcacatcggcaaacaagtctggtttcacgttggagaaatattccacctggttgtattcgctaggcgcggccagtttttcgaacgcagccatgtcagacatggtgttcggcgactgtttcgcttttgcgacccattggtcgaattcggcgcgatccggtgttgcaatagctttgaacttcatgcctgagaagcccggcccgctgtagctggcggagataccgtcataagtaccgggttcgttggcgatcagatgcaggcgagtctgcataccggccatggcataaatctggctacccagacgcggaatgaagaaggagttcatcacggagttggaggtcactttgaagtacaccggagtgttcgccgggaaagcgatttcattcacggttgcaatgccctgttccgggtagatgaagaaccatttccagtccatggaaaccacttcgatggtaatgggcttctcgtcgtgtgccagcggcttgctaggctcaagagcgtgagtggttttccaggtcagtaccgcaaggaagatgatgattaagataggtaccgtccagaccacagcttccactttattggagtgtgaccagttcgggctgtacttagcatctttattgctcgcacgatacttccaggcgaaaccaacagccatcaagattgcgggaataacgacaatcaacatcaggccaaatgccgtcagtatcagtgaacgttgctccagaccaatctgtcctttgggatctaacagcgcagaattacagccactgagcaatacagtgcctgcaaataatgacaaccatcccaaacttttattgtatttcctgagtctcatttaacgacctcaattccacgggatctggtggcgtttaaagtgtgtgggcattttacggggaggttacattactgtaaacatgattaaattcctgttacttggatttggctgtcaggttacatatgttgcaaaacatatcaagttgattttaagaagctgttgcaaaagggcgttataacgaaaggggagtgcagaaggagtttggacgggcaattggtataaccaatctggaataaaacaattgtttaacaaataattatcattatggtgacaattgggtgggggggaaaataaagactcattagctgaatcgtgtaagaaaaaatagaattcataaattgcgtcaataatttccaaacgctaagccgcacaaaagaacaaatattattaagcgatactgatgtttatttagccgtaataattacggcgagtgattactacagctaaataatatttacagattacgtcagatgcgtttttcgtagagccagataatccagcaaaccaccaagcacgacgccagaaagggcgactaaaaccccgacttccagcagagcaggcaggaaagagaagtgcgtcaaatccagcgcgtccatcgtcaacagcagtaaccacacggccaacaggctgacgcccgccgccagtgtccacatggcaaaggcataacctgtcggatattcggtacgggagataaagttgtcatttactcgtgtatattcaagcgtctggcggcaaaccagcagcaaaataagccccggtacggcagcggcgacggagaatagatagaatgtcgaccagccgtgtgcttcaacaaaccaacccgccacggggccgacataaactcgtcctacagcggaaagcgctgagagcagggcaaattgagtagcggaaaatgacttattacacagcgtcattaacagcgcgacaaaggctgatgtgcccatcccgccacagaggttttcgaaaaagacggctgcgcccatgctgtagagatgcttatcagtaatcgacagcagccagtaaccagcgttagacgcaccttgtaaaatgccgaaaatcagcagcgcccggaacagcgacaggcgctgcatcaaaatcccaccgtacaatgcgcccacaatggtcgccagtaagccaagcgttttgttaaccacgcctacttcacccgcatcaaacccgacgccgcgaatcaaaaacgtggttgtcaggctcatggcgaatgcgtcgcccagcttatacagcacgataagaagcaaaataagccaggcattattgcgaccaaagaaatctcgcagaggtgcaacaaccgcttgttccagcgtttttggcacaggaatggtgtcggtcggttctggtgcaagcaacgtcgcgataatacaagggatcaacagcgccgccatcaaccagtacatgccctgccagcccagccatttatctgccagccacagggctaagccgccggaaaccagcatccctaaacggtaacccagcacgctgattgccgcgcccgcaccacgttcttctgccgggagcacatcggttttccacgcatcgaagacaatatcctgggaggccgagcaaaaagcgatcaccaccgccagtgccgccatccagcggagttgggtgccaggttcgagaaaacccatcgccgcaatggcgactaataacaggatttgcgtggcgagcagccaaccgcgccgccgcccaaaaaatgggggcgtgtagcggtccatcagcggtgaccagaggaatttaaaaacgtaagcctggcctaccagagagaagaaaccaatggttttgagatcaatattctcgaccgtcatccaggcctgtaaggtaccggatgtcagggcgagcggtagcccggaagcaaaacccaggatcagcaatatggctgaacgcggctgttgaaaaatacgtaaatattgactggacatgggcgtctacaggcccggtttgcaccgggccagagggcagaaattaacgcgcgttctgcttgatgaattcgtggatgctggtgtcctgagacatatcagcgatggtatcggtcagcacactgttaaccgcatcggcgatatttttgttggaggcctggaacgcaccttcaacgttgtagctggcacgatagtttttggtcattttgttgccattctgcgcggtagcgatgatggcgatatccgctttggtcgcgatgttgtagcgcacgttgccctgggacacgtcagcatacagttggctaacgatgatttgcagattaaccgggccattcggaccaaccatgtaaccacgcgcggtcatctgtttttccagcacttcttgcagcaggaaacgcagatctcgggaggcggtcagggtaacgatttgattatcgcgggtgacttttgccagcgcctgatcggtacgctgatcggcaccattaatgcttacggtgacgcccatcaggcttggatcctgctgtggcagtgtaatcgtcggggaaacttcaatagttgttggcggttttgcgcatcctgcaagcataaacagagcaactaacgggaagaggatttttttgaacatgttcgggctctcagagactcttaagcgtgtttggtaaaaattcccgccatcataacattgccaacggcgaggggaagtgggtaaggcatgtaaattcatcatgttggcgaaataatcacccctggtaaaagaaacgctgatgcgaggcctgtgtttcaatctttaaatcagtaaacttcatacgcttgacggaaaaaccaggacgaaacctaaatatttgttgttaagctgcaatggaaacggtaaaagcggctagtatttaaagggatggatgacatctcagcgttgtcggaggagatatttcatgatgatacgtgagcggatagaagaaaaattaagggcggcgttccaacccgtattcctcgaagtagtggatgaaagctatcgtcacaatgtcccagccggctctgaaagccattttaaagttgtgctggtcagcgatcgttttacgggtgaacgttttctgaatcgtcatcgaatgatttacagtactttagcggaggaactctctactaccgttcatgcgctggctctgcatacttacactattaaggagtgggaagggttgcaggacaccgtctttgcctctcctccctgtcgtggagcaggaagcatcgcgtaaaaacgcatttgcaactgtcggcgcttttccagtatgttgctaaagattttatgaaaaacggcctgcgggccgttttgttttgtctggattttgcgctttttgcccagcatttagacgaaaattgcccgggaattgtgaaaaaatacgcgacagcgcgcaataaccgttctcgactcataaaagtgatgccgctataatgccgcgtcctatttgaatgctttcgggatgattctggtaacagggaatgtgattgattataagaacatcccggttccgcgaagccaacaacctgtgcttgcggggtaagagttgaccgagcactgtgattttttgaggtaacaagatgcaagtttcagttgaaaccactcaaggccttggccgccgtgtaacgattactatcgctgctgacagcatcgagaccgctgttaaaagcgagctggtcaacgttgcgaaaaaagtacgtattgacggcttccgcaaaggcaaagtgccaatgaatatcgttgctcagcgttatggcgcgtctgtacgccaggacgttctgggtgacctgatgagccgtaacttcattgacgccatcattaaagaaaaaatcaatccggctggcgcaccgacttatgttccgggcgaatacaagctgggtgaagacttcacctactctgtagagtttgaagtttatccggaagttgaactgcagggtctggaagcgatcgaagttgaaaaaccgatcgttgaagtgaccgacgctgacgttgacggcatgctggatactctgcgtaaacagcaggcgacctggaaagaaaaagacggcgccgttgaagcagaagaccgcgtaaccatcgacttcaccggttctgtagacggcgaagagttcgaaggcggtaaagcgtctgatttcgtactggcgatgggccagggtcgtatgatcccgggctttgaagacggtatcaaaggccacaaagctggcgaagagttcaccatcgacgtgaccttcccggaagaataccacgcagaaaatctgaaaggtaaagcagcgaaattcgctatcaacctgaagaaagttgaagagcgtgaactgccggaactgactgcagaattcatcaaacgtttcggcgttgaagatggttccgtagaaggtctgcgcgctgaagtgcgtaaaaacatggagcgcgagctgaagagcgccatccgtaaccgcgttaagtctcaggcgatcgaaggtctggtaaaagctaacgacatcgacgtaccggctgcgctgatcgacagcgaaatcgacgttctgcgtcgccaggctgcacagcgtttcggtggcaacgaaaaacgagctctggaactgccgcgcgaactgttcgaagaacaggctaaacgccgcgtagttgttggcctgctgctgggcgaagttatccgcaccaacgagctgaaagctgacgaagagcgcgtgaaaggcctgatcgaagagatggcttctgcgtacgaagatccgaaagaagttatcgagttctacagcaaaaacaaagaactgatggacaacatgcgcaatgttgctctggaagaacaggctgttgaagctgtactggcgaaagcgaaagtgactgaaaaagaaaccactttcaacgagctgatgaaccagcaggcgtaatttacgcagcataacgcgctaaattcgcacaaaggcccgtcaccgccaggtggtgggcttttttttgtcatgaattttgcatggaaccgtgcgaaaagcctctttcggtgttagcgtaacaacaaaagattgttatgcttgaaatatggtgatgccgtacccataacacagggactagctgataatccgtccataaggttacaatcggtacagcaggttttttcaattttatccaggagacggaaatgtcatacagcggcgaacgagataactttgcaccccatatggcgctggtgccgatggtcattgaacagacctcacgcggtgagcgctcttttgatatctattctcgtctacttaaggaacgcgtcatttttctgactggccaggttgaagaccacatggcgaacctgattgtggcgcagatgctgttcctagaagcggaaaacccagaaaaagatatctatctgtacattaactccccaggcggggtgatcactgccgggatgtctatctatgacaccatgcagtttatcaagcctgatgtcagcaccatctgtatgggccaggcggcctcgatgggcgctttcttgctgaccgcaggggcaaaaggtaaacgtttttgcctgccgaattcgcgcgtgatgattcaccaaccgttgggcggctaccagggccaggcgaccgatatcgaaattcatgcccgtgaaattctgaaagttaaagggcgcatgaatgaacttatggcgcttcatacgggtcaatcattagaacagattgaacgtgataccgagcgcgatcgcttcctttccgcccctgaagcggtggaatacggtctggtcgattcgattctgacccatcgtaattgatgccagaggcgcaactgtgccgctatacttatccagggcggcacaacgctgtaagcggcttgcgcctgagaatggcatttgcgtcgtcgtgtgcggcacaaagaacaaagaagaggttttgacccatgacagataaacgcaaagatggctcaggcaaattgctgtattgctctttttgcggcaaaagccagcatgaagtgcgcaagctgattgccggtccatccgtgtatatctgcgacgaatgtgttgatttatgtaacgacatcattcgcgaagagattaaagaagttgcaccgcatcgtgaacgcagtgcgctaccgacgccgcatgaaattcgcaaccacctggacgattacgttatcggccaggaacaggcgaaaaaagtgctggcggtcgcggtatacaaccattacaaacgtctgcgcaacggcgataccagcaatggtgtcgagttgggcaaaagtaacattctgctgatcggtccgaccggttccggtaaaacgctgctggctgaaacgctggcgcgcctgctggacgtcccgttcaccatggccgacgcaaccacgctgaccgaagccggttatgtgggcgaagacgttgaaaacatcattcagaagctgttgcaaaagtgcgattacgacgtacagaaagcgcagcgcgggattgtctacatcgatgaaatcgacaagatttctcgtaagtcagacaacccgtccattacccgagacgtttccggtgaaggcgtacagcaggcactgttgaaactgatcgaaggtacggtagctgctgttccaccgcaaggtgggcgtaaacatccgcagcaggaattcttgcaggttgatacctctaagatcctgtttatttgtggcggtgcgtttgccggtctggataaagtgatttcccaccgtgtagaaaccggctccggcattggttttggcgcgacggtaaaagcgaagtccgacaaagcaagcgaaggcgagctgctggcgcaggttgaaccggaagatctgatcaagtttggtcttatccctgagttcattggtcgtctgccggttgtagcaacgttgaatgaactgagcgaagaagctctgattcagatcctcaaagagccgaaaaacgccctgaccaagcagtatcaggcgctgtttaatctggaaggcgtggatctggaattccgtgacgaggcgctggatgctatcgctaagaaagcgatggcgcgtaaaaccggtgcccgtggcctgcgttccatcgtagaagccgcactgctcgataccatgtacgatctgccgtccatggaagacgtcgaaaaagtggttatcgacgagtcggtaattgatggtcaaagcaaaccgttgctgatttatggtaagccggaagcgcaacaggcatctggtgaataattaaccattcccatacaattagttaaccaaaaaggggggattttatctcccctttaatttttcctctattctcggcgttgaatgtgggggaaacatccccatatactgacgtacatgttaatagatggcgtgaagcacagtcgtgtcatctgattacctggcggaaattaaactaagagagagctctatgaatcctgagcgttctgaacgcattgaaatccccgtattgccgctgcgcgatgtggtggtttatccgcacatggtcatccccttatttgtcgggcgggaaaaatctatccgttgtctggaagcggcgatggaccatgataaaaaaattatgctggtcgcgcagaaagaagcttcaacggatgagccgggtgtaaacgatcttttcaccgtcgggaccgtggcctctatattgcagatgctgaaactgcctgacggcaccgtcaaagtgctggtcgaggggttacagcgcgcgcgtatttctgcgctctctgacaatggcgaacacttttctgcgaaggcggagtatctggagtcgccgaccattgatgagcgggaacaggaagtgctggtgcgtactgcaatcagccagttcgaaggctacatcaagctgaacaaaaaaatcccaccagaagtgctgacgtcgctgaatagcatcgacgatccggcgcgtctggcggataccattgctgcacatatgccgctgaaactggctgacaaacagtccgttctggagatgtccgacgttaacgaacgtctggaatatctgatggcaatgatggaatcggaaatcgatctgctgcaggttgagaaacgcattcgcaaccgcgttaaaaagcagatggagaaatcccagcgtgagtactatctgaacgagcaaatgaaagctattcagaaagaactcggtgaaatggacgacgcgccggacgaaaacgaagccctgaagcgcaaaatcgacgcggcgaagatgccgaaagaggcaaaagagaaagcggaagcagagttgcagaagctgaaaatgatgtctccgatgtcggcagaagcgaccgtagtgcgtggttatatcgactggatggtacaggtaccgtggaatgcgcgcagcaaggtcaaaaaagacctgcgtcaggcgcaggaaatccttgataccgaccattatggtctggagcgcgtgaaagatcgcatccttgagtaccttgcggttcaaagccgtgtcaacaaaatcaagggaccgatcctctgcctggtagggccgccgggggtaggtaaaacctctcttggtcagtccattgccaaagccaccgggcgtaaatatgtccgtatggcgctgggcggcgtgcgtgatgaagcggaaatccgtggtcaccgccgtacttacatcggttctatgccgggtaaactgatccagaaaatggcgaaagtgggcgtgaaaaacccgctgttcctgctcgatgagatcgacaaaatgtcttctgacatgcgaggcgatccggcctctgcactgcttgaagtgctggatccagagcagaacgtagcgttcagcgaccactacctggaagtggattacgatctcagcgacgtgatgtttgtcgcgacgtcgaactccatgaacattccggcaccgctgctggatcgtatggaagtgattcgcctctccggttataccgaagatgaaaaactgaacatcgccaaacgtcacctgctgccgaagcagattgaacgtaatgcactgaaaaaaggtgagctgaccgtcgacgatagcgccattatcggcattattcgttactacacccgtgaggcgggcgtgcgtggtctggagcgtgaaatctccaaactgtgccgcaaagcggttaagcagttactgctcgataagtcattaaaacatatcgaaattaacggcgataacctgcatgactacctcggtgttcagcgtttcgactatggtcgcgctgataacgaaaaccgtgtcggtcaggtaaccggtctggcgtggacggaagtgggcggtgacttgctgaccattgaaaccgcatgtgttccgggtaaaggcaaactgacctataccggttcgctcggcgaagtgatgcaggagtctattcaggcggcgttaacggtggttcgtgcgcgtgcggaaaaactggggatcaaccctgatttttacgaaaaacgtgacatccacgtccacgtaccggaaggtgcgacgccgaaagatggtccgagtgccggtattgctatgtgcaccgcgctggtttcttgcctgaccggtaacccggttcgtgccgatgtggcaatgaccggtgagatcactctgcgtggtcaggtactgccgatcggtggtttgaaagaaaaactcctggcagcgcatcgcggcgggattaaaacagtgctaattccgttcgaaaataaacgcgatctggaagagattcctgacaacgtaattgccgatctggacattcatcctgtgaagcgcattgaggaagttctgactctggcgctgcaaaatgaaccgtctggcatgcaggttgtgactgcaaaatagtgacctcgcgcaaaatgcactaataaaaacagggctggcaggctaattcgggcttgccagcctttttttgtctcgctaagttagatggcggatcgggcttgcccttattaaggggtgttgtaaggggatggctggcctgatataactgctgcgcgttcgtaccttgaaggattcaagtgcgatataaattataaagaggaagagaagagtgaataaatctcaattgatcgacaagattgctgcaggggctgatatctctaaagctgcggctggccgtgcgttagatgctattattgcttccgtaactgaatctctgaaagaaggggatgatgtagcactggtaggttttggtacttttgccgttaaagagcgtgctgcccgtactggccgcaacccgcagaccggtaaagagatcaccatcgctgccgctaaagtaccgagcttccgtgcaggtaaagcactgaaagacgcggtaaactaagcgttgtccccagtggggatgtgacgaagttcaagggcgcatctactgatgtgccttttttatttgtattcggtgactttctgtgtcttgtgggctgacaattgcccccgtttcttgtcacaataggcctttgcgcgcatcgatacgttgcgtgaggtacacagtcatctacagcggagtgttgttacaccatgatggacagcttacgcacggctgcaaacagtctcgtgctcaagattattttcggtatcattatcgtgtcgttcatattgaccggcgtgagtggttacctgattggcggaggcaataactacgccgcaaaagtgaatgaccaggaaatcagccgtgggcagttcgagaacgcctttaacagcgagcgtaatcgcatgcagcaacagctgggcgatcaatactccgagctggcagcgaacgaaggctatatgaaaaccctgcgtcaacaggtgctgaatcgtctgatcgacgaggcgctgttggatcagtacgctcgtgagctgaaactgggtatcagtgatgagcaggttaaacaggcgattttcgcgaccccagccttccaggttgacggcaaatttgataacagccgctataacggtatcctcaaccagatggggatgaccgccgatcagtacgcccaggcgctgcgtaaccagctcactacccaacagctgattaacggtgttgccggtaccgattttatgctgaaaggtgaaaccgacgagctggcggcactggtcgcgcaacaacgcgtggtgcgtgaggcgactatcgatgttaacgcgctggcggcgaagcagcctgtgaccgaacaggagattgccagctactacgaacaaaacaaaaacaatttcatgacgccggaacaattccgcgtgagttacatcaagctggatgccgcaacgatgcagcaaccggttagcgatgcggatatccagagctactacgatcagcatcaggatcaattcacccagccgcagcgtacccgctacagcatcatccagaccaaaactgaagatgaagcgaaagcggtacttgatgagctgaataaaggcggtgattttgctgcattagccaaagaaaaatctgccgatattatctctgcccgtaacggcggcgatatgggttggttagaagatgccactatccccgacgaactgaaaaatgctggtctgaaagaaaaaggccaactgtctggtgtcatcaaatcttcggtcggtttcctgattgtacgtctggacgacattcagccagcgaaagtgaaatcgttagacgaagtacgtgacgacattgcggcgaaagtgaaacacgaaaaagccctcgatgcgtactatgcgctgcagcagaaagtgagcgatgcggcaagcaacgacaccgagtctctggccggtgcagagcaagctgccggcgttaaagccactcagacgggttggttcagcaaagataacctgccggaagagttgaacttcaagccggttgccgacgctatctttaacggcggtctggtaggtgaaaacggcgcgccgggcatcaactctgacatcatcaccgtagacggcgaccgcgcattcgtgctgcgcatcagcgagcacaaaccggaagcggtgaaaccgttggcagatgttcaggaacaagttaaggcactggttcagcacaacaaagctgaacaacaggcgaaagtggatgctgagaaactgctggttgatttgaaagccggcaaaggggcggaagctatgcaggctgccggtctgaaatttggcgagccgaaaaccttaagccgttccggtcgtgacccgattagccaggcggcgtttgcactgccactgccagcgaaagacaaaccgagctacggtatggcgaccgatatgcaaggtaatgtggttctgctggcgctggatgaagtgaaacaaggttcaatgccggaagatcagaaaaaagcgatggtgcagggtatcacccagaacaacgcacaaatcgtctttgaagctctgatgagtaacctgcgtaaagaggcgaaaatcaaaattggcgatgcgctggaacagcaataatcctgaagccgcctcgcaaaaaaatgcgttgcagctgtaacaagaaaaggtcgctttcgcggccttttccatttctgaacattgccatttgtttactgttttcactcccgttaaggtgattccactgttaacaaacaaggagaaaacagtatgaaacacggaattaaagcactgctcattaccctgtccctggcctgtgccggaatgtctcatagcgcgctggcggcagcttctgtggcgaaaccgacggcggtatgaggtagcctgagtttaacggacactccttcctgaaatagaatggcatcagaaggagctaataatgagcagaaaaacccaacgttactctaaagagttcaaagccgaagctgtcagaacggttcctgaaaatcaactttcgatcagtgaaggcgcttcccgattatctcttcctgaaggcactttaggacaatgggttaccgccgccagaaaagggctcggtactcctggttcccgcacggtggctgaactggaatctgaaattctgcaactgcgtaaggcgttaaatgaagctcgccttgagcgagatatattaaaaaaagcaacagcgtattttgcacaggagtcgctgaaaaatacgcgttaatcgaacaatggcgacaacaatttcccattgaagcgatgtgtcaggtatttggtgtatccaggagcggttattacaactgggtacagcatgaaccctcagacagaaaacaaagtgatgagcggctaaaactggagattaaggtggcacatatccgcactcgcgaaacatatggaacccggcggctccagacggagctggcagagaatggcatcatcgttggtcgtgaccgactggcacgtcttcgtaaggagctaaggctacgctgtaagcagaaacgcaagttcagagcgactacgaactcgaaccacaatctgccagttgcgccaaatctgctgaaccagacgttcgctcctacagcaccaaatcaggtctgggtggcggacctgacgtatgttgccacacaggagggatggttgtacctcgctggcatcaaagatgtttatacgtgcgaaattatcggctacgccatgggagagcgcatgacaaaagagctgacaggtaaagccctgtttatggcgctcaggagccagcgcccacctgccgggctaatccaccactctgatcgaggttcacagtactgcgcatacgattaccgggtcatacaggagcagtctggtctgaaaacatcaatgtcgcgtaaaggtaactgttacgacaacgctccgatggaaagcttctggggaacgctgaaaaatgagagcctgagccactatcgttttaataaccgggatgaagccatctcagtaatacgggaatacattgagattttctacaatcgtcagcgtcgtcactctcgtctggggaatatctccccggcagccttcagggaaaaatatcatcagatggctgcttaaaaaaagaacaaatggtagtgtccgctattgccagtacacctcagtagaaaccaaagcggaagctcctgcagcacaaagtaaagcagcagtaccggcgaaagccagtgacgaagaaggcacccgggtcagcattaataatgccagcgcggaagagctagcccgcgcgatgaatggcgttggcctgaagaaagcgcaggcgattgtcagttatcgcgaagagtacggtccgtttaaaacggtggaggatctaaagcaggtgccggggatgggcaattcgctggtggaacgtaatctggcggtattaaccctgtaattaatttgcatagtggcaattttttgccagactgaagaggtcataccagttatgacctctgtacttataacaacaacgtaaggttattgcgctatgcaaacacaaatcaaagttcgtggatatcatctcgacgtttaccagcacgtcaacaacgcccgctaccttgaatttctcgaagaagcccgctgggatgggttggaaaatagcgacagttttcagtggatgacggcccataacatcgccttcgtcgtggtcaatatcaatattaactatcgtcgcccagcggtattaagcgacctgttaactattaccagtcagttgcagcaattaaacggtaaaagcggcatcttaagccaggtcattacactggagccggaagggcaggtggtagcggatgcgcttattacgtttgtttgtattgatcttaaaacgcagaaagcattagctctggaaggggaattgcgcgaaaagctggagcagatggttaagtaaacgttttgtggtgccggatgctcaagccgcatccggcgacacccggaataattacctcaacccggttttctgcttcatcgctgccatcaccgtcggtttatcggccagataatgattcaaaccgttggcgcgtaaattacatgccgcacaatgaccgcaaccgtcgcctttaatgccgttatagcaggtcaacgtttcgttacggactaaatccagtttgccgtaataatctgccagcgcccaggtttccgctttatcaatccacatcagcggcgtttcaaaacgaatatctttcgccatgcccaaactgacggcatggtttagtgctttcacaaactcatcgcggcaatccgggtagccggagaaatccgtttcacagacgccggtaattacggcttctgcttttacctgatacgcatatattgccgccagcgtcaggaacaaaatattacgcccagggacaaacgtattcgggatgccatcggcttcaggttcataatcaggcaccggaatgctgtcacgtgtcaggctgctgaccgccagctcgttgagcagcgttacatcaagaaccttatgcgcgcgtgctcccagtttcagcgccagttcgcgtgccacgtcgatttctgcgcgatgtcgctgaccgtaatcgaacgtcacgcaatggacttcatcatattgttgtaatgcctgcaccagacaggtggtggaatcctggcctccactgaacacaacgacagcacgtttcatagataatcctgcttgaacaataaaagcgttatggtaacgcctgcgattaacccggaccagctattcattgcgacggcgcgggaagccaggcttcggtaaattcaaaccagccgcgcggtgtcagtcgcacaccgttcacgccgggaggggcactaatgcgatagtgatagttgaacagcggcgtcagcgtcgcgtctgccattaactggctaaaaaccgctttcagggcattaaatcggttttcctcatcaggcattacttgcaccgcgtccagcgtcgattgcagatgtgcatatgctggagcgtcgaaaacatgtggccatagtggatcgcaacgtagccattgctccagagtatattccggtgcttcgccaattaatctgtcgcccatcatgaggtctgcgtgtgccagtagggtcgtgtcgtcccagttttttgcgttatgaaaaataattgtgagttcacagccttccgctgccagtgtcgcctgtaggcgttctgccatggtatgaagttctatcggtaggtgataaaccagcgtcaaggttttcggtagtttgacttcatccggtacttgccagtgcggaatagtccagcctggcagtaatgcatgactggcggtgatcaggttttctccgacttctaacgtttgtaataaaccggattgatgaataatggagatcacttttcgcgcctgccagagggagagtcggggacttttgcgcaacgttaaatagcaaaaacctaaactgatgccactactgacctggctgacccgttgcagctcctccggtttgccgatggtgatttgcacgggatgccgacaactggttcccaaatctttttcgaaaagcggcggagttatccagtactcaaccgctttaagcagcggatgacgcaaatggtaataatcatggctctccaggcgcaccagctccgctgtgaattgtgttaagcgaaaaggaccagtgccgatcagtgggaattgcggatgcgccagatggctgcaatagctcgccagccggtgcgcaagccagtaatcggggcgatgtaaaaagaaggtcagacactgcggatgggtgacttcaatacgcttcacgctaataaataattgatccagtgctggcagttgtaacagcatcaataatcgctggtgtaagtgtgaggcttttactgcatcgccgttatgccagtgtagggttgaacgaagataaaagtcccagcgtaacccgtcagtagaggtttccctgtgatgcgctaaatcgccaatcgggcgctgagtattattatcgaagcgggtcaggccggaaaatatctgcccggcgagatgctgctcggcacggccgggcaaaaagcctggttgtagcggttcgagcgggcgatagtagggaatacgcaacgtgggtgtatcgttttgccattgtccgcccataaacggctgtaacagagtgcgcagctcacctggggccagttgcgccagctccagcacatcttgctgctttccggtttccagtgcctgttccatcatcgcattgcgtagcgattccggcgtgaccagaaagcgtaattgtccgcgctttccgcgtcctgactgcgcctgccactccagccatcccgcctcctgtgcctgacgcaacagcgtacgaacatggcgttcgctgcaaaaacagcgttcggccagttcgctgacggtgacggtttgcggctttccggctgaaggttgccacagacgttgatactggttaagacggttgagcaatcgcatataaacccggaacaatattatttaactattcactattacttccgtatatatcaggtgatactcaatctccattaaccgtgtcacagagtggagaaagaaatggctcgtctggcagcatttgatatggatggcactttattgatgcctgaccatcatttaggtgagaaaaccctctctactttggcgcgactgcgtgaacgcgacattaccctcacttttgccacggggcgtcatgcgctggagatgcagcatattctcggggcgctatcgctggatgcatatttgattaccggcaacggaacgcgcgtgcattctctggaaggtgaacttttacatcgtgatgatttacctgcggatgtcgcggagctggtgctgtatcagcaatgggatacccgagccagcatgcatatcttcaatgacgacggttggtttaccgggaaagagatccctgcgttgttgcaggcatttgtctatagcggttttcgttatcagataatcgatgtcaaaaaaatgccactcggcagcgtcaccaagatctgcttctgtggcgatcacgacgatcttacacgcttgcagatccagctatacgaagcattaggcgagcgtgcacatttgtgtttttccgccacagattgcctcgaagtgctgccggtgggctgcaataaaggcgctgcattgacggtgctgacccaacatttaggtttatcgttgcgcgattgcatggcctttggtgatgcgatgaacgatcgcgaaatgttaggcagcgtcggtagcgggtttattatgggcaatgcgatgccgcaactgcgcgcggagctcccgcatttaccggtgattggacattgccgaaatcaggctgtctctcactatttgacgcactggctggactatccacatctaccttattcccccgaataacgagatcccttccagcaccgggcaattgcccggtttttttgcgttgaatttgtcattttgtgccgtggtgtttaaaccgcacagaataaattgtcgtgatttcacctttaaaatagaattaaaagagaaaaaaattctccgtggaagggctatgttagataaaattgaccgtaagctgctggccttactgcagcaggattgcaccctctctttgtaggcactggctgaagccgttaatctgacaaccaccccttgctggaagcgcctgaaacggctggaggacgacggtatccttatcggcaaagtcgccctgctggatccggaaaaaataggcctcggcctgaccgcctttgtgctgataaaaacgcaacatcacagcagcgaatggtattgccgctttgtcacggtggttaccgaaatgccagaagtgctggggttctggcgcatggctggtgaatacgattatctgatgcgcgtccaggttgccgacatgaaacgctacgacgagttttataagcgtctggtaaacagcgtgccggggctgtcggacgtcacttccagcttcgcgatggaacagattaaatacaccacttctttacccatcgaataaatatccagaatcaggtcaggacacaacgcgtgcgattatttgctcaattaagctggtatttccgtcgggaatggcgtcgctatctcggggctgtcgccttgcttgtcattatcgcgatgctgcaactggttccgccaaaagtggttggtattgttgtcgatggcgtgacagaacaacactttactaccgggctgatcctgatgtggatcgccaccatggtgctgattgccgttgtggtttatctcctgcgttatgtctggcgcgtattgctgtttggcgcgtcttaccaactggctgttgaactgcgtgaagattattaccgtcagctaagccggcagcacccggagttttacctgcgtcatcgcacgggtgatctcatggctcgtgcgaccaatgacgtcgattgcgtcgtgtttgccgccggagaaggggtgctgacgctggtggattcactggtaatgggctgcgctgtgttgattatgatgtctacgcaaattagctggcagttgaccttatttgccctgttgccgatgccagtgatggcgatcatgattaagcgcaacggcgatgctttgcatgaacgctttaagctggcacaggcggcgttttccagtcttaatgaccgcacccaggaaagcctcaccagtatccgcatgatcaaagcctttggtctggaagatcgccagtcggcgttatttgccgcggatgccgaagataccggcaaaaaaaacatgcgggtggcgcgtattgatgctcgtttcgacccgaccatctatatcgcgattggtatggcgaacttgctggcgattggcggcggtagttggatggtggtgcagggcagtttaacgctgggccagctcaccagttttatgatgtatttaggtctgatgatttggccaatgctggcgctggcatggatgtttaacattgtggaacgtggtagtgctgcgtacagccgtattcgtgcgatgctggcggaagcgccggtggtgaacgatggtagcgaacccgtgccggaagggcgtggcgaacttgatgtaaatattcaccagttcacgtatccgcagactgaccatcctgcgctggaaaacgtcaatttcgccctgaaacccggtcagatgctgggtatctgcgggccgactggttccggcaaaagtaccctgttgtcgctcattcagcgtcatttcgacgttagcgagggggatattcgctttcatgatattcctctgacgaagttacaactcgatagctggcgtagccgcctggcggtggtcagccagacgccattccttttttctgacaccgtggcaaataacatcgcgctgggttgcccgaatgccacccagcaagagattgagcatgtcgcgcggttagccagcgtacatgacgatattttgcgtttaccgcaaggttacgatacagaggtgggcgagcgcggcgtgatgctttccggcgggcaaaaacagcgtatctctattgctcgtgcgttattagtcaacgcggaaatcctcatccttgatgatgcgctttcggcggtggacggacgcacagagcaccagatcctgcataacctgcgtcagtggggacagggaagaacggtaatcatcagtgcccatcgcctttcggcactgacggaagccagtgaaattattgtgatgcagcacggacatatcgcccagcgtggcaatcatgatgtgctggcgcaacaaagcggctggtatcgcgatatgtatcgctatcaacaactggaggcggcgctcgacgacgctccggaaaatcacgaggaggccgtcgatgcgtagttttagccaactgtggccgactctcaagcgcctgttagcgtacggttcaccgtggcgtaaaccgctggggattgcggtcctgatgatgtgggttgcggcggcggcagaagtcagtgggccgctgcttatcagctattttatcgacaatatggtagcgaaaaataacctgccgttgaaagtggttgcagggctggctgcggcgtatgttgggctacaactgtttgccgccgggctacattacgcgcagtcgctgctgtttaatcgggcggcagtaggcgtagtgcaacagttgcgtaccgacgtgatggatgctgcgttacgccagccattaagcgagtttgatacccaacccgtcgggcaggtgatttcccgcgtcactaatgacactgaagtgatccgcgatctctacgttaccgtagtggcaactgtcctgcgcagtgccgcactggtgggcgcgatgctggtggcgatgttcagcctcgactggcgaatggcgctggtggcgataatgattttcccggtagtgctggtggtaatggtgatatatcaacgttacagcacgccgattgtccgtcgtgtgcgcgcctatctggcggatatcaacgacggctttaacgaaatcatcaatggcatgagcgtcatccagcagttccgtcagcaggcgcgatttggcgaacgtatgggtgaggccagtcgttcacactatatggcgaggatgcaaaccctgcgcctcgacggttttctgctgcgtccgctgctgagtctgttttcatcgctcattctttgtggattgttgatgctgtttggcttctccgccagcggcaccattgaagtgggcgtgctgtatgcctttatcagctatcttgggcgacttaacgaacccttaatcgaactgaccacgcaacaggcgatgctgcaacaggctgttgttgctggtgagcgcgtgtttgaactgatggacggaccgcgccagcaatatggcaatgatgattacccgttacagagtggcaccatcgaagtcgataacgtgtcatttgcttatcgcgatgacaatctggtgctaaagaacattaatctctctgtgccttcgagtaactttgtggcgctggtcgggcataccggcagtggtaaaagtaccctcgccagtttattgatgggctattacccgctaacggaaggtgagattcgccttgatggtcgtccattaagttcgctaagtcacagcgcgctgcgccagggcgtggcaatggtgcagcaagatccggtggtgctggcggataccttcctcgccaacgtgacgctggggcgggatatctccgaagaacgcgtctggcaggcgctggaaaccgtgcaactggcggagctggcgcgtagcatgagcgacggtatttacacgccgctgggcgagcaggggaataatctctcagttgggcaaaagcaactgctggcactggcgcgcgtgctggtcgagacgccgcaaatcctgatccttgatgaggcaaccgccagcattgactccgggactgaacaggcgattcaacatgctctggcggcggtgcgtgaacataccacgctggtggtgattgctcaccgcttatcgaccattgttgatgccgacaccattctggtgcttcatcgtgggcaagccgtggagcagggcactcaccagcaactgctggctgcccagggacgctactggcagatgtatcaactgcaacttgcgggcgaagagctggcagccagcgtgcgtgaagaggaatcattgagcgcctgaatagcgcaatatttcatcgttggtgcaaaaatgtaacgcactgtgcactgtcatagtgcgttttcattttcaaacttcttaacttcctgctctctttctcgtttttcatttctggcacaccgcttgcaataccttcttcgtgtagcagaaccattaccgaattctgaccggaggggatctatgaagctggtgaccgtgataatcaaaccattcaagctggaagacgttcgtgaagcgttatcttccattggtattcagggcctgaccgtcaccgaagtgaaaggtttcgggcgtcagaaagggcatgccgagctgtaccggggggcggaatacagcgtcaacttcctgccaaaagtaaaaattgatgtggcgattgctgatgaccaactcgatgaagtgatcgatatcgtcagtaaggcggcttacaccggaaaaattggcgacggcaaaatcttcgtcgctgaattgcaacgcgtcattcgtattcgtaccggcgaagccgacgaagcggcgctgtaatctctggcacacagcaacaggaacgaaaaatgaagatagcgacgataaaaactgggcttgcttcactggcgatgctgccgggactggtaatggctgcacctgcggtggccgataaagccgacaatgcgtttatgatgatttgtactgcgctggtgctgtttatgactattccggggattgccctgttttacggtgggttgattcgcggcaaaaacgtgctgtcgatgctgacgcaggtgacggtgacgtttgcactggtctgtattctctgggtggtttacggttactcgctggcgtttggtgagggcaacaacttcttcggcaacattaactggttgatgctaaaaaacatcgaactgacggcggtgatgggcagcatttatcagtatatccacgtggcgtttcagggctcgtttgcctgcattaccgtcggcttgatcgttggggcgctggcggaacgaatccgcttctcagctgtgttgattttcgtggtggtatggctgacgctctcttacattccgattgcgcatatggtgtggggcggtggtttgctggcttctcacggtgcgctggatttcgcgggtggcacggtggtgcatattaacgccgcaatcgccggtctggtgggcgcgtatctgataggcaaacgcgtgggcttcggcaaagaggcgtttaaaccgcacaacctgccaatggtcttcaccggtactgccattctctatattggttggtttggctttaacgccgggtcagcgggcacggcgaatgaaatcgcggcactggcatttgtgaatactgtggtcgcaacggcggcggcaattcttggctggatcttcggtgaatgggcgctgcgtggtaagccttctctgctgggagcgtgttctggcgcgattgccggtctggtcggcgtgacgccagcgtgtggctacattggggttggcggcgcgttgattatcggcgtggtagctggtctggcgggcttgtggggcgttactatgctcaaacgcttgctgcgggtggatgatccctgcgatgtcttcggtgtgcacggcgtttgtggcattgtcggctgtatcatgactgggatttttgccgccagttcgctgggtggcgtgggcttcgctgaaggtgtgacgatgggccatcagttgctggtacagctggaaagcatcgccattacgatcgtctggtccggtgtggtggcatttattggctacaaactggcggatctgacggttggtctgcgtgtgccggaagaacaggagcgagaagggctggacgtcaacagccacggcgagaatgcctataacgcgtaacaagcactgcaaaaaacagccggacggttttcacctccggctatttttttaattgtgattacgcatcaccccttcctgaacggtcgaggcaaccagcacgccgtcctgagtataaaactcaccgcgcacaaagccgcgtgcgctggacgccgaggtgctctccacgctatacagcagccattcattcaaattaaacgggcgatgaaaccacatggaatggtcaatggtggcaatctgaatccccggttcgagaaaaccgatgccgtgcggctgtagagctaccggcaggaagttaagatcagaagcgtaaccgagcagatactgatgaacgcgcaggtcatccggcacgctaccatttgcgcggatccacacctgacgatgtggttctgcgacgtgacctttcagtgggttatgaaactccaccggacggacttccagcggacgatcgcagatgaatttatctttcagcactggcggcagcaggtgcgccagcgattgggcgatttgtgtttccgaaggcaggccatcaggcgctggcgcggacggcattgttttttgatgttcgaaacccgcttcaggtgcctggaaagaggccgtcatataaaaaatcggtttgccgttttgaatagcagcaacccggcgggcgctgaagctgttaccgtcacgcagcgtttcgacatcataaataatcggcttcttactatcgccagggcgaagaaagtagctgtgaaacgaatgtaccagccgctcttcagggacggtctcttttgcagcatacaaggcctgacccacgacctggccgccaaacacctggcgtaaacctaaatcttcactctggccgcgaaagagtccttcctcaattttttccagatttaacaatgtcagtaaattttttagcgcctgactcatataactctccagtaactaagctgccgcagcaagccaaagtgagttgagtataacgcaaatttgccactggtccgatgggtgcaatagtctgaattacgggctaattacaggcagaaatgcgtgatgtgtgccacacttgttgacgttactattttgttaaccactcttccggcgaggaaagttagcccgctggtgcattgataataaggagaagtgaatgaaactcgtgcacatggccagttgtttagcggttgcgattgcgttggcggcttgcgcagataaaagcgcggatattcagacgccagcaccggcggcaaatacgtctatttcagcaacacaacaacctgctatccagcaaccgaatgtctccggtaccgtttggatccgtcagaaagtcgcactgccgcctgatgctgtgctgaccgtgacactttctgacgcgtcgttagccgatgcgccgtcaaaagtgctggcgcagaaagcggtgcgtaccgaaggtaaacagtcaccattcagctttgttctgccttttaacccggcagatgttcagccgaacgcgcgtattctgttgagtgcggcgattaccgtgaatgacaaactggtatttattaccgataccgttcagccggtgatcaacaagggcggaactaaagccgacctgacattggtgccgatgcagcaaaccgccgtgccggttcaggccagcggtggtgcaacgactaccgtaccttcgacttcaccaactcaggtgaatccgtcttcggcagttccagctcctacgcaatattaagcgacgttaaccctctccgcccggagagggttagtagttccagcgataacgctgcaagtcgatttgcccgcttcccgataccatcacaccttctgccagtaatgcctgtcgctgacgctgtaaatccggtccggttagcgaaattgtgccgtggcgattaaccacccggtgccagggtaaggtgctgccttcagggagacgctttaacacaccgcccacctggcgcgcggcgcggggcgatcccgccagtttcgccacatcaccgtaagtggtgacatagccttcgggaatagcggcgacgatttgccagacgcgttggggaaatgaatcttctttttccatcttttcttcctgaggtaatttttcagcataatctggaaaaacgcccgagtgaagtcgcattgcgcaagaaaccagcatctggcacgcgatgggttgcaattagccggggcagcagtgataatgcgcctgcgcgttggttctcaacgctctcaatgggggctctgttggttctcccgcaacgctactctgtttaccaggtcaggtccggaaggaagcagccaaggcagatgacgcgtgtgccgggatgtagctggcagggcccccacccatttctgcctcccaccgtttcgtcaaaaaatcccaacatagctaaactttaaccacaactgacgtcgcaagaattgtctggctgcgcagtacgcttcggaggtatgtctgatgaagtatgttgatggttttgtggttgccgttcctgccgataaaaaggatgcctatcgggaaatggccgctaaggctgcgccattgtttaaagagtttggcgcgcttcgtattgtcgaatgctgggccagcgatgtaccggatggcaaagtgaccgattttcgtatggcggtgaaagcggaagagaatgaagaggttgtctttagctggattgaatacccttcaaaagaggtccgcgacgctgctaatcaaaagatgatgtcggacccacggatgaaagagttcggcgagtccatgccgtttgacggcaagcgaatgatctatggcggattcgagtcaatcatcgacgaataggtagcgtgacgggctgtgcggcgtgccgtcagcccaaaaattcacaaatgttgctcggcccagcgtaagaaatcttctttcggtaatgccttgctgtagagccagccctgaccgtagtgcacgccatgctggcgtagccactcttcttgtttactggtttcgattccctccgctaccattttcagtttcagtgtttttgccatttcgatgatatgcggcgtgacatttttatattccagcgcatcaacgaaagatttatcgatcttcagaatgtcgacatccagatcctgtaaataacttaaacttgaatatcccgtaccaaaatcatcaagataaatttcatggcccgcctcccggtagcgagaaattatcggggcgctggttttcggatcggcaaactcgcgttcagtgagttcaagcgcgatctgtctgggattaacctgattgattgatcatttcacgcagcaattgcgggattttttccgaggtgagcacggtggattcaagattgatcgaaatatgctgctgtggatgctgacgcagccagtcgcccatatcttcaaaggcgcttcttataatcagtagcgtcaatggctcagaaaggcccgtttgctgtgccagcggaataaaactatctggtgacaaccaactaccgtctgtctgcggccagcgcgccagtgcctcagcaccgacaattttgccattggctaaggagacaatcggctgatagtgcacgcaaatatcacgattttcgatagcatcctgcagccgatgatgcggtgactggatacggcgcaaaatacgcagcacaaacatcgctgccagcaggccaatcaccaacccgagcggtaaccaaataaagacttgccgatgccagcctttctgcaacattttcgttgaagcccaggtgatgatcgaaatattcatctccgggaagggcaggatatcgtaaatgattccattattttcgatatgctcaccgggtgttttttgtagcctggtaataattccctgagcaatttcatcgctgctggttatgacaacgttatgggcattgccaataatggcggcatcaatttgccatgagctatagggaatgacatcaataaaggaagcggggtcgatcatgacgacataatgtgccgttcccatggcgaccatgtaacggataatgcctaaatcgttatgcgatgttaaccagacacgataaccatctttcgaaattttacctggctcggggaaggtatcgggcggactttcatgctccagagacgaacactggggaacgttgttatcgatataaaccacttcctgaatatagcgataactgtaagatacccgacgcatttccatgagatgggcttcgctacaggcagcgccttgccatctttccagctcttgcagcgcatctttcccttgtgtcgccaccttattggcccgaatagcgacgcgggaggaataggtatccagctcttcaataaacgatgtttctacctgctgatgggccagccagatgcttaagccgacaggcagcaatactgaaagaatcagtactcccgaaataaggccgaccagatgtcgtgttctcaccagcatatccttattaacacagtgtagggaaagtatatctgattgtggaaaaaggctggcaggagataaggaggtagagctggtatttcatgaagtgatgggtggaaacgatcattgtcatttgaccaagcgcagagctttacgcctggtatgtaaccctaacttaagatgttgattcggcgcgagcgagggtaaaaatatcgtaaaaagacagttcacctttacggacgatcattttttgcagttgttccttatgaacatccgcgacacgcggagagttcaagatggcttcaaccagcgcggcaggtacaaagcgcgtgttgtaccattcgccgttatagcaaacgcggaaatccagcacgtcgatatcttcatagcggtagcgtgggtagacatcgaaaaagaagaaaccattaagcaggataaataatacaaccagtagccagacagagcctgacagcgtttcggactgcaacatcaccgccagggtggcaaaaaaagcaacgtacataccgataaacagccccggatgtttacggataaaactgatactaaagcggggtttgttgtcgcgtttttcgcgggtattcagagactcaatcgtttcggtcagcaggcgttgtatttcggtcatcgtttgccttcgtggtatctgcaactttccagggaacaccctattttaacgtgggaatagtagaggggaagtaacagatttaccacaattttgcataacagttgcgaaaaaccgattacaattttttaattattctggctggattaccgcccacgacaacgttgtccgggacatcttttgtgacaactgcacctgaggctaccacgacgttatcaccaatggtcacaccagggttaatgaccgcgcgtccgccaatccagacgttattaccgatggtgacgggtttccccagttcagcaccgctattacgtgctacagggtcgatgggatgtgttgccgtgtagatatgaacgcctggtgccaacatacagttatcaccgatgcgaatagggcagacatcaagcatcacgcaatcgaagttggcgaaaaaattattaccgagaaaaatgttatagccatagtcacagcgaaacgttggctcaatataagcctctgtcacctgaccgaatagatcagcgagaatttgctggcgtaatgtgtgctcttccgccagggaatgattgtatcggtgaataagctgacgagcgcgcaggcgatcgcgagataacgtctcatctgccgagcgatacaactcaccagcaatcatcttttctttttctgtgctcattactgacctccggttgctgaaaatgcggcaacacagtaagacgaaaagtcagtgaagagaacgttcccattacatctgtgtgataaagatcacatagggtatgtcttcatggtgaaaagtataaaattcttaataaacagccggttatagctccgaaagcgaattatttattagcgaataaatttccatactgaggaagggatcttgtcgtatagtttattcatggtcaattcggcgaggcggtgatctgcggctgagtaaaataccgccagttcattatctgataattcgtatttatttttctcgataacacgctccagcgtgtcaattgtctggcaacgacgtaaacgcattaaataatcggttttcgttaaaggtttttcggacatacttctacccatggttgtaataattctaacaagataaactcgcaggattctctttcgtcgcattgacaaaacaacggaatagtcgattacctgacttccgccatttctgaagatcctgcatattaataccataactactgaacaacataaaggtgtcatccagatattcgtcgatctgctcaatgagcttattgtcttcattatacttaattttgtaattaagtgcgaaggtcgcaatatgctcaatcagttcattcaactggaggttgatcgccgaggttgggtcgttaacccagccatgattgctttcttcaaggtttgcaaggcagtcatgatacagggtttcacagagaaacttaagctgtgcgatatcatgtcttttgggtgagtattcatccataacgcgtccccttcttagcggttgaactaacggacacctttcgggatggaaaaaacttactgacctggacttgccctctcgtttgttagcttaactataagccactctttgcaggttttcatcgcattattacgaaaaattacaattaggaaggaatcgggacaggactcactttttcatactagcactaacccgcagcaggtaaaagcagtctgctcgaactgttcataacatttcaggattatcgccagatgaaattggtgacactaataccaggattgctctgaatatgacgtaataaccgaggaatgaataaagaattaccgcaaataattaagaatagcctctaaatgattatggattattaaatctattagcgctacttaatataaattaactaacaatcagtattttttatgaattttatccgtggttaatactggttttcgtatgagatcctgagttggtggttcaattactccttaatgttcgtaggttatgcataaaaaaggccgcttgcgcggccttagtgattacacgttgtatcaatgatgatcgacagtatggctgtgctcgatatcttcattcttgcggctaaagcggcggcgaaccaccacaaagaataccggaacgaagaagattgccagtaccgttgcggtcaccatcccgcccattacaccggtacctactgcgttctgcgcgccggaaccagcaccagtactgataaccagcggcataacgccgaggataaacgccagcgaggtcatcaggatcggacgtaaacgcatccgcactgcatcaagcgtcgcttcaatcagacctttaccttctttatccatcaagtctttggcgaattcgacgataagtatcgcgttcttcgccgacaacccaatggttgtgagcaggcctacctggaagtaaacgtcattggtcaggccacggaaggtggcagccagcaacgcaccgataacccccagcggaacgaccagcataacggagaacggaatcgaccagctctcgtacagcgccgccagacacaggaatacgacaatcaacgaaatcgcgtacagtgaaggtgcctggttgccggagagacgttcctgataggacatccccgtccagtcatagccaacaccggtaggcagtttgctcgccagttgttccatcagctccattgcttcaccggtacttttacccggtgccgcctggcctaagatttccatggatggcaggccgttgtaacgttccagacgcggcgaaccgtactcccaacgagaagaggagaacgccgagaatggcaccatctgaccatcagcagcacgaacataccagtcgccgatatcatccggcagcatacggtatttcgcttctgacatgacgtaaactttcttcacacgaccgcggtcgataaagtcgttcacatagctaccgccccatgcagcgcccagagaggtgttaatgtcgttgatagaaacacccagcgcctgcgctttttcctggtcgatatcaatcttaaactgcggggtatcttccagaccgtttggacgtacgctggtcagcatatcagggtgcttcgctgcttctgcaagcagctggttacgcgcctgagtcagtttttcgtgaccaaggccagcctggtcaatcagctcaaagtcaaagccggttgcagtacccagttccacgattgcgggcaggttaaaggcgaaaaccatcgcatctttgatttgcgagaaagcgcgtgttgcacgcatggtaatcgcttcaactttgttttcttcgcccggacgatcggcccagtccttcaaggaaacgaacgcaataccggtattctgaccacgtcccgcaaagccgaagccgttaacggcgaacaccgactcaacgttgttcttttctttggtcagatagtaatgcgttacctcattgagcactttctgcgtacgttcctgcgttgcacctgctggcagctgaaccatggtcataaatacgccctggtcctcatctggcaagaaggagcttggcagacgcacgaacagataggccatgccgaccacgatgatcagatacagcaccaggtaacgccccgtactgcgcagaataccgcctacgctgtcggtgtagtggtgcgtgctcttctcgaacatgcggttaaaccagccgaagaagccttttttaccttccccgtgatcgcctttggcaatcggtttcagcatggtggcacaaagagccggagtcaggatcaacgctaccagtaccgacagcgccattgctgaaacaatggtaatagagaactgacgatagatagcaccagtagaaccgccaaagaaggccatcggtacgaataccgccgacagtaccatcgcgataccgaccagagcgccctgaatctgccccatcgacttacgggtagcttcttttggcggcaaaccttcttccgccataacacgctccacgttttctaccacaacgatagcgtcatccaccaacaagccgatggcgagcaccatcccgaacattgttagcgtgtttatcgagaagccaaaggcggcaaggacggcaaaggtcccgagcaataccaccggtacggcaatggtcggaatcaacgtcgcgcggaagttctgcaggaacagatacataaccaggaacacgaggatgatcgcttcgaccagcgttttaaccacttcgtgaatagagattttcacgaacggcgtggtgtcgtacgggtaaacaattttcagacccgacgggaagaacggttccatcttcgccagttcagcacggattgccgcagcggtatccagcgcgtttgcaccggtcgccagcttgatccccagaccggaagccggttggccgttaaactctgcgatgatgtcgtagttctcaccacccagctcaatcttcgccacatcacgcagcagtacgcgggaaccatcctgattcactttcagcaggattttgccgaactcttcagtagaggtcagacgcgtctgagcaataatagaggcgttaagctgttggcctttcaccggcggcgtaccaccgagctgacccgccgcaacctgggcgttctgcgctttgatggcggtaatgacatcaaccggcgttagctggaatttgttcagctcattcgggttcatccagatacgcatcgcgtactgtgaaccgaacaactgaacatcacccacgcccgacgtacggctgatggcatctttcatattcgccgctacgtagtcagagatatcctcctgcgtcatggtgccatcggtgttgataacgccgacaaccatcaggaagctgctggatgatttctcaacgctcaccccttgctgctgaacttcttgcggcagcaacggcatcgccagctgcagtttgttctgcacctgaacctgcgcgatatccgcatcagtaccagactcaaaggtcagggtgatctgcacggtacccgtggagtcactgttagaggacatgtacatcaggttatcgataccgttcatattctgttcgataacctgtgtcaccgtgtcctgcactgttttcgcatcagcgccggggtaggaggcggagatcgttactgccggcggtgcaatcgtaggatattgcgccaccggcagtttgaggatcgccagcccccctgccaacatgatgataatggcgatcacccacgcaaaaatcgggcgatcgataaagaaattaggcatgtcttaacggctcctgtttaagttaagacttggactgttcaggctgagcaccgcttgcggcttgctggttattatcagcggtaacttcttgtgcttttacctggacaccaggacgcactttctgcagcccacttattactacgcgatcgcctgctttcagaccttctgtcaccagccacttatcgccaatagcctggcttgcaacgatcggacgggtttccactttgtcatccgcgccaactaccagtacggtggcatcaccacgcggcgtacgggttacgccctgttgcgggactaaaatagcgtttggattaagcccttcttccagacgtgcgcgcacgaacatacccggcagcagagtgtgatccgggttcgggaagatagcgcgtagggtgatagacccagtggtctgatcaacggtaacgtcagagaattccagcgtaccgtcctgcgggaacttaatgccgtcactggtgatcagcgacactttggctttgccgttctcttgtttcagcgtgccattcgccagttcctgtttcaggcgcaggaagtcgttgctggactgggtcacatcaaggtagatcggatcaagttgctgcacggttgccagcgcagtcgcctgaccgttctgtaccaatgcgccttccgtcacgttcgacttaccaatgcgaccgctaatcggagaggtgactttggtgtaagccagattgatccgcgcagtttcaacggcagctttcgccgcagttaccgcagcattcgcctgttgcgcatcagccagagcctgatcgtactcttgcttactgatgtactgagtaccgagcagtttctgataacgattcaccgtcaattgcgcgatattggctgcagcctgggctttcgccagatcacctttcgcactgtcgtatgtcgcctgataggtcgcaggatcaatctgatagagagagacaccagcttcgatgtcgctaccttctttgaaattacgcttcaggataatcccgctaacttgaggacgaacttctgcgatccggtaggcactggtgcgacccggaagctcggttgtgatctgcagaggttcagttttgactgttactacgccaacggcgggcatctgctggccaccttgttgggcctgtttgtcgtcacatcctgttagggctaagctgcctgagagcatcagaacgaccgccagaggcgtaaaccctctgtttttgttcatatgtaaacctcgagtgtccgatttcaaattggtcaatggtcaaaagttaataaacccattgctgcgtttatattatcgtcgtgctatggtacatacattcacaaatgtatgtaaatctaacgcctgtaaattcacgaacatatggcacgaaaaaccaaacaagaagcgcaagaaacgcgccaacacatcctcgatgtggctctacgtcttttctcacagcagggggtatcatccacctcgctgggcgagattgcaaaagcagctggcgttacgcgcggtgcaatctactggcattttaaagacaagtcggatttgttcagtgagatctgggaactgtcagaatccaatattggtgaactagagcttgagtatcaggcaaaattccctggcgatccactctcagtattaagagagatattaattcatgttcttgaatccacggtgacagaagaacgacgtcgattattgatggagattatattccacaaatgcgaatttgtcggagaaatggctgttgtgcaacaggcacaacgtaatctctgtctggaaagttatgaccgtatagaacaaacgttaaaacattgtattgaagcgaaaatgttgcctgcggatttaatgacgcgtcgggcagcaattattatgcgcggctatatttccggcctgatggaaaactggctctttgccccgcaatcttttgatcttaaaaaagaagcccgcgattacgtcgccatcttactggagatgtatctcctgtgccccacgcttcgtaatcctgccactaacgaataaccctgaatctgactccaggatttttcctggacattttcgtcgttgctattctggttcactgcgtcgtgatattcttgcggtttgactttttcaggtcgttcttcaggttcagaaaccttcattcatcatgactatgttccagtattacaaacgatcacggcattttgttttttcagcatttattgcttttgtttttgtcttgttatgccagaacacggcgtttgcgcgggcgtcatcgaatggtgatctgccgacaaaagcggacctgcaggcgcaacttgactcactaaataaacaaaaagatctttctgctcaggacaaactggtgcagcaggatctgacagatacattagccaccctcgataaaatcgatcgcataaaagaagagacagttcagctacggcaaaaagtcgctgaagcgccggaaaaaatgcgccaggcgaccgcggcgttaacagcacttagcgatgtcgataacgacgaagaaacgcgcaaaattctgagtacgctttcgttgcgccagctggaaactcgcgttgcccaggcgctggacgatttgcaaaacgcacaaaacgatctggcgtcttataacagccagctggtttcgttacagacgcagcccgaacgcgtgcaaaatgcgatgtataacgcttcgcagcagctgcaacaaattcgcagtcgtctggatgggactgatgtcggcgagactgccttacgtcccagccagaaagtgttaatgcaggctcagcaggcgttgctgaatgcggagattgaccagcagcgtaaaagcctggaagggaacaccgtcttgcaggataccttgcaaaagcaacgtgattacgtgacggcgaacagcgcccgtctggagcaccagttgcagctgttgcaagaagcggtaaacagcaagcgcctgactttaactgaaaaaacggcgcaggaagccgtctccccggatgaagccgcgcgtattcaggctaatccgctggtgaaacaggaactggaaattaaccagcagttaagtcagcgtctgattaccgcgactgaaaacggtaatcagttgatgcagcaaaacattaaagtcaaaaactggctggagcgggcgctgcaatcggaacgcaatattaaagagcagattgccgtcctgaagggcagcctgctgttgtctcgtatcctttaccagcaacaacaaacgctgccctcggcggatgaactggaaaacatgaccaaccgcatcgcggatttgcgtctcgaacagtttgaagttaaccagcagcgtgatgcactcttccagagcgatgcgttcgtcaacaaactggaagaaggtcacaccaacgaagtcaacagcgaagttcacgatgcgttattgcaagtggttgatatgcgtcgcgaattgctggatcaactcaacaaacagttgggtaaccagctgatgatggccattaacctgcaaatcaaccagcagcagttaatgagcgtatcgaaaaacctgaaatccatcctgactcagcaaatcttttgggtgaacagtaaccgtccaatggactgggactggatcaaagcgttcccgcaaagcctgaaagatgaatttaagtcgatgaaaatcacggtgaactgggaaaaagcctggcctgccgtttttatcgctttcctcgccggtttgccgctgctgttgattgccgggctgatccactggcgtctgggctggctgaaagcgtatcaacagaaactggcttccgctgtgggttccctgcgtaacgatagccagctcaacacaccaaaagcgatccttatcgacctgatccgcgcgctgccggtgtgcctgattattctcgcggttggcctgattctgttgaccatgcagctcaacatcagcgaactgctatggtcgttcagtaaaaaactggcgattttctggctggtgtttggcctgtgctggaaggtactggagaaaaatggcgttgccgtgcgtcacttcggcatgccggagcagcagaccagccactggcgtcggcaaattgtccgcatcagtctcgcgttgctgcctatccatttctggtctgtggtggcagaactttccccgctgcatctgatggatgatgtgctggggcaggcgatgattttcttcaacctgctgctgattgccttcctggtatggccaatgtgccgcgaaagctggcgtgataaagagtcgcacaccatgcgactggtcaccattaccgtgctgtcgattatcccgattgcattgatggtgctgactgccacgggttatttctacaccacgctgcgcctctccgggcgttggattgaaaccgtttatctggtgatcatctggaacttgctctaccagacggtattgcgcggcttaagcgtagcggcgcggcgtatcgcctggcgtcgtgcgctggcgcgtcggcagaatctggtgaaagagggcgcagaaggtgccgaaccgccggaagaacccaccattgcactggaacaggttaaccagcagacgctgcgtattaccatgttgctgatgtttgcgctgttcggtgtcatgttctgggcaatttggtccgatttgatcaccgtgttcagctatctcgacagcatcacgctctggcattacaacggcactgaagctggcgctgcggtggtgaaaaacgtcaccatgggcagtctgttgtttgcgattatcgcctcaatggtggcctgggcgttgattcgcaacctgcctggtttactggaagtgctggtgctctcgcgactgaatatgcgtcagggcgcgtcgtatgccattactaccatccttaactacatcattattgccgttggtgcgatgacggtgttcggatcgctgggcgtctcttgggataaactccagtggctggccgcagcattatccgtaggtcttggttttggtttacaagaaattttcggtaacttcgtctccggtttgatcattctgttcgaacgtccggtgcgtattggcgatacggtaaccattggtagcttctcggggacggtaagtaagatccgtattcgtgcgacaacgattaccgatttcgatcgcaaagaagtgatcatcccgaacaaagcgtttgttaccgagcgtctgatcaactggtcgttgactgacactactacgcgtctggtgatccgtctcggcgtggcctatggctccgatctggaaaaagtgcgtaaagtgttactgaaggcggcgactgagcacccaagggtgatgcacgaaccaatgccggaagtcttctttacggcgtttggtgccagcacgttggatcatgagctgcgtctgtatgtgcgtgaactgcgtgaccgtagtcgtactgtcgatgagctgaaccgtactatcgatcagctgtgccgtgaaaacgacatcaacattgcctttaaccagcttgaagtgcatctgcacaacgagaagggcgatgaggtgacggaagtcaaacgcgactacaaaggcgatgacccgacgccagcggtagggtaataaccaaagggggcgacatttagttgccccgagattactgacaaagtgcgcgttgttcatgccggatgcggcgtgaccgccttatccggcctacgaaaccgcaagaattcaatgtattgcaggagcggtgtaggcctgataagcgtagcgcatcaggcagttttgcgtttgcccacaatcttaggggacatttagcggccccatttatttctcacttttccgcctcatcatcgcgcgttaatttcttttcataatcgcgttttacaatatccagcgcgcgcagcacggtgcgggctgggatctgattttcttccagcagcacaatcaaatcgacagccagtttgacatcgtcaggggcattttcaagtgacatactctctccattgctagcgggttaagcgcgctagcctgttttcgattttttccagcgcatggcggcagcgtgccaggcgcgcttcataggcttccacttcacgatgcagcgtttgctgttccacgagatcggtcacccgcgccaggcgggctctgcgttcggcaaccatctcacgtagccgccgctcaaaatcctgatgctgaatacgtttacgctgccagcgggcaattttcggtggcgcactgtcccactcgcgcaatgaccaggcggaggcttcacgcgcgatggcttccagttgtgccgccagatgttccgccagccaggccacttgcggcagctgttgctgctcaaccgcatgacaaagcgcagccagattatcgcccgcctcgtcgagacaagcctgtagtgttgtcgcacgagtctgaaaaagatgcctgtcgaaacgagcacttagcgtggcgaactgtgacaccggggcacaacgctgacgcagcgtagcgagctgtccttccagtttttccagcagcagggcggttttcacgataagacctcaatgaaaatgataattgttatgctaaagtagccactctgtaagctgacaacactcaatatgcaacgaatcattttaatcatcattggctggctggcggtagtgctgggtacgctgggcgtggtattaccggtattaccgacgacgccgtttatcctgctggcggcctggtgctttgcccgttcttccccgcgctttcacgcctggttgctgtaccgctcatggtttggcagctatctacgtttctggcagaaacatcatgcgatgccgcgcggcgtcaaaccgcgggcgattttgcttattttgctcacgtttgccatttctctgtggttcgtccagatgccatgggtgcgcatcatgttgctggtaattctcgcctgtttgcttttctatatgtggcgaattccggtgattgatgaaaagcaagaaaagcactgaagcacaacaatcgcagttgcaattattgcgtacagccagtacattctggcgttttcgagcacaggcgcaggcggtcaaaggttaaacaactgttacttttgatacgtttaaaacgcgccgtgagtaccaccgtaacaagcaggcatacacttatgaccgcgactgcacagcagcttgagtatctcaaaaatagcatcaaaagcattcaggactacccaaaacccggcattcttttccgcgatgtcaccagcttactggaagacccgaaagcttacgctctcagcatcgacttgctggttgagcgttacaaaaatgcgggcattaccaaagttgtcggcaccgaagcgcgtggcttcttgtttggcgctccggtagctctgggtctgggcgttggctttgtaccggtccgtaaaccgggcaaactgccgcgtgaaaccatcagtgaaacttacgacctggaatacggcaccgatcagctggagatccacgttgatgccatcaaaccgggcgacaaagttctggtggtggacgatctgctggcaaccggcggcactatcgaagcgaccgttaaactgatccgtcgtctgggtggtgaagtggctgacgctgcgttcattatcaacctgttcgatctcggcggcgaacagcgtctcgaaaaacagggcattaccagctacagccttgtcccgttcccgggccattaattatcgccagtcttgtgctgcccacgctacggacagcacaagatgtgcattcagcctcgccgttctgacggggctgtgttagcattaccccttcgtgaatccaccttccagcgtttcagagcctgccaatgagttatcaggtcttagcccgaaaatggcgcccacaaacctttgctgacgtcgtcggccaggaacatgtgctgaccgcactggcgaacggcttgtcgttagggcgtattcatcatgcttatcttttttccggcacccgtggcgtcggaaaaacctctatcgcccgactgctggcgaaggggctaaactgcgaaaccggcattaccgcgacgccgtgcggcgtgtgcgataactgtcgtgaaatcgagcaggggcgctttgtcgatctgattgaaatcgacgccgcctcgcgcaccaaagttgaagatacccgcgacctgctggataacgtccagtacgctccggcgcgtggtcgtttcaaagtttatctgatcgacgaagtgcatatgctgtcgcgccacagctttaacgcactgttaaaaacccttgaagagccgccggagcacgttaagtttctgctggcgacgaccgatccacagaaattgccggtgacgattttgtcgcgctgtttgcaatttcatctcaaggcgctggatgtcgagcaaattcgccatcaacttgagcacatcctcaacgaagaacatatcgctcacgagccgcgggcgttgcaattgctggcgcgcgccgctgaaggcagcctgcgagatgccttaagtctgaccgaccaggcgattgccagcggtgacggccaggtttcaacccaggcagtcagtgcgatgctgggtacgcttgatgacgatcaggcgctgtcgctggttgaagcgatggtcgaggccaacggcgagcgcgtaatggcgctgattaatgaagccgctgcccgtggtatcgagtgggaagcgttgctggtggaaatgctcggcctgttgcatcgtattgcgatggtacaactttcgcctgctgcacttggcaacgacatggccgccattgagctgcggatgcgtgaactggcgcgcaccataccgccgacggatattcagctttactatcagacgctgttgattggtcgcaaagaattaccgtatgcgccggaccgccgcatgggcgttgagatgacgctgctgcgcgcgctggcgttccatccgcgtatgccgctgcctgagccagaagtgccacgccagtcctttgcacccgtcgtgccaacggcagtaatgacgccaacccaggtgccgccgcaatcagcgccgcagcaggcaccgactgtaccgctcccggaaaccaccagccaggtgctggcggcgcgccagcagttgcagtgcgtgcagggagcaaccaaagcaaaaaagagtgaatcggcagccgctacccgcgcgcggccggtgaataacgctgcgctggaaagactggcttcggtcaccgatcgcgttcaggcgcgtccggtgccatcggcgctggaaaaagcgtcagccaaaaaagaagcgtatcgctggaaggcgaccactccggtgatgcagcaaaaagaagtggtcgccacgccgaaggcgctgaaaaaagcgctggaacatgaaaaaacgccggaactggcggcgaagctagcggcagaagccattgagcgcgacccgtgggcggcacaggtgagccaactttcgctaccaaaactggtcgaacaggtggcgttaaatgcctggaaagaggagagcgacaacgcagtatgtctgcatttgcgctcctctcagcggcatttgaacaaccgcggtgcacagcaaaaactggctgaagcgttgagcatgttaaaaggttcaacggttgaactgactatcgttgaagatgataatcccgcggtgcgtacgccgctggagtggcgtcaggcgatatacgaagaaaaacttgcgcaggcgcgcgagtccattattgcggataataatattcagaccctgcgtcggtttttcgatgcggagctggatgaagaaagtatccgccccatttgatcgtaagcacagcttacgttcgtcatccttaacgtgattgagagagaaacctatgtttggtaaaggcggtctgggtaacctgatgaagcaagcccagcagatgcaagaaaaaatgcagaaaatgcaggaagagatcgcgcagctggaagtcaccggcgaatctggcgcaggtctggtaaaagtgaccatcaacggtgcacacaactgccgtcgcgtagagatcgacccgagcctgctggaagacgacaaagagatgctggaagacctggtggctgcagcattcaacgacgcagcacgtcgtattgaagaaacgcagaaagaaaaaatggcctctgtatcctccggaatgcagctgccgcctggctttaagatgccgttctgatgcaaaccagcccgctgttaacacagcttatggaagcactgcgctgtctgccgggcgttggcccgaagtcggcgcagcgtatggcgttcacgctgcttcagcgcgatcgtagcggcgggatgcgtttggcgcaggcgctcacccgggcgatgtcggaaatcggccactgcgccgattgccgcactttcaccgaacaggaagtctgtaacatctgttcgaatccgcgtcgtcaggaaaacggtcaaatctgtgtggtggagagtccggcggacatctacgccattgagcagacggggcagttttctggtcgttattttgtgttgatggggcatctgtcaccgctggacggcatcggtccggatgatatcgggcttgatcgtctggaacagcgtctggcagaggaaaaaatcactgaagtgatcctcgccaccaatcccacggttgaaggtgaagctaccgctaactacattgccgagctttgcgcgcaatatgacgtggaagccagccgaatcgctcatggcgtaccggttggcggcgaactggaaatggtcgatggcaccacgctgtcacactcccttgccgggcgtcataagattcgtttttaagcaaacgagagcaggatcacctgctctcgcttgaaattattctcccttgtccccatctctccctcatcctgtttttaaccttaaaatggcattattgaggtagacctacatgaaaggacaagaaactcgtggttttcagtcagaagtgaaacagcttctgcacctgatgatccattctctctattccaataaagaaatcttcctgcgtgagcttatctctaacgcctccgatgcggcggacaagctgcgtttccgtgcgctatctaacccggacctgtacgaaggtgatggcgaactgcgcgttcgtgtctctttcgataaagacaagcgcacgctgaccatctctgataacggcgtggggatgacccgcgacgaagtgattgaccatctggggactatcgctaaatccggtaccaaatcattcctcgaatccctgggttctgaccaggcgaaagacagccagctgatcggtcagtttggtgttggtttctactctgcgtttatcgtggccgacaaagtgaccgtgcgtactcgcgcggcaggcgaaaaaccagaaaacggcgtcttctgggaatcggctggcgaaggtgaatataccgttgccgacatcaccaaagaagatcgtggtactgaaatcaccctgcatctgcgtgaaggcgaagacgagttcctcgatgactggcgcgtgcgttccatcatcagcaaatactccgaccatatcgcgctgccggtagagatcgaaaaacgcgaagagaaagacggcgaaaccgttatctcctgggagaaaatcaacaaagcgcaggcgctgtggactcgtaacaagtcggaaatcaccgatgaagagtacaaagagttctacaaacacatcgcccacgactttaatgatccgctgacctggagccacaaccgcgttgaaggtaagcaggagtacaccagcctgctgtacattccgtcccaggctccgtgggatatgtggaaccgtgatcataaacacggcctgaaactgtacgtccagcgtgtgttcatcatggacgacgcagaacagttcatgccgaactatctgcgcttcgtgcgtggtctgattgactccagcgatctgccgctgaacgtttcccgtgaaatcctccaggacagcacggtaacgcgtaacctgcgcaatgcgctgaccaagcgtgtgctgcaaatgctggaaaaactggcgaaagacgacgcggaaaaataccagaccttctggcaacagtttggcctggtactgaaagaaggtccggcggaagatttcgctaaccaggaagcgatcgccaaactgctgcgttttgcttctacccataccgattcttctgcgcagaccgtatctctggaagactacgtttcccgcatgaaagaagggcaggagaaaatctactacatcaccgcagacagctatgcggcagcgaagagcagcccgcacctggaactgctgcgtaagaaaggcatcgaagttctgctgctttccgaccgcatcgatgagtggatgatgaactatctgactgagttcgacggtaaaccgttccagtcggtgtctaaagttgacgagtcgctggaaaaactggctgacgaagttgatgagagcgcgaaagaagcggagaaagcactgactccgttcatcgaccgtgtgaaagccctgctcggcgagcgcgtgaaagatgtccgtctgactcaccgtctgaccgatacgccagcgatcgtttcgaccgacgcggacgaaatgagcactcagatggcgaaactgttcgctgcggcgggccagaaagtgccagaagtgaaatacatcttcgaactgaacccggatcacgtactggtgaaacgtgcggcagatactgaagatgaagcgaagttcagcgagtgggtagaactgctgctggatcaggcgctgctggcagaacgcggcacgctggaagatccgaacctgtttattcgtcgtatgaaccagctgctggtttcctgatgtcatgccggatgacctttgtgtcatccggcatttttcttttcatcatctgcactttccgcaaattatctcgccattaaccgtttcagcctcaggtgcctttcttgaggcaatcgcctgttggtggtatcgtttatcgctttttcaaaaaaatcgacacattttaaggggattttcgcaatgcgtatcattctgcttggcgctccgggcgcggggaaagggactcaggctcagttcatcatggagaaatatggtattccgcaaatctccactggcgatatgctgcgtgctgcggtcaaatctggctccgagctgggtaaacaagcaaaagacattatggatgctggcaaactggtcaccgacgaactggtgatcgcgctggttaaagagcgcattgctcaggaagactgccgtaatggtttcctgttggacggcttcccgcgtaccattccgcaggcagacgcgatgaaagaagcgggcatcaatgttgattacgttctggaattcgacgtaccggacgaactgattgttgatcgtatcgtaggccgccgcgttcatgcgccgtctggtcgtgtttatcacgttaaattcaatccgccgaaagtagaaggcaaagacgacgttaccggtgaagaactgactacccgtaaagacgatcaggaagaaaccgtgcgtaaacgtctggttgaataccatcagatgactgcaccgctgatcggctactacttcaaagaagcggaagcgggtaacaccaaatacgcgaaagttgacggcaccaagtcggttgctgaagttcgcgctgatctggaaaaaatcctcggctaatcaagccgcagcagatctgctttcgggcaggtctgctcatccacctcaggcaatacctctcacagcaattagttcttcttcctcacttttccgctacaattatcaacaagttgaatcgataagaggcggtaatgcgtcagactaaaatcggtatcctgctggcaaacctgggtacgcccgatacccccacacctgaagcggtaaaacgctatctgaaacaatttttaagcgacagacgcgtggttgatacctcacggttgttatggtggccattgctgcgcggcgttattttgccgctgcgctcgccgcgtgtggcgaagctgtacgcctcggtctggatggaaggtggctcgccgctgatggtttacagccgccagcaacagcaggcgctggcacaacgtttaccggagacgcccgtagcgctgggaatgagctacggctcgccatcactggaaagcgccgtcgatgaactcctggcagagcatgtagatcatattgtggtgctgccgctttatccgcaattctcctgttctacggtcggtgcggtatgggatgaactggcacgcattctggcgcgcaaacgtagcattccggggatatcgtttattcgtgattacgccgataaccacgattacattaatgcactggcgaacagcgtacgcgcttcttttgccaaacatggcgaaccggatctgctgctgctctcttatcatggcattccccagcgttatgcagatgaaggcgatgattacccgcaacgttgccgcacaacgactcgcgaactggcttccgcactggggatggcaccggaaaaagtgatgatgacctttcagtcgcgctttggccgggaaccctggctgatgccttataccgacgaaacgctgaaaatgctcggagaaaaaggcgtaggtcatatacaggtgatgtgcccgggctttgctgcggattgtctggagacgctggaagagattgccgagcaaaaccgtgaggtcttcctcggtgcgggcgggaaaaaatatgaatatattccagcgcttaatgccacgccggaacatatcgaaatgatggctaatcttgttgccgcgtatcgctaaagctgagcggtaaagaactgagcgccgtcgcgaagagcctcgtcggcggttttcatcatccgtgaataatgcaaaaaggcatgcagcgtacctgggtagagtttgaactcacagggctgctgatgcgccgctaacgtctggtaaagcagacggctgtcatccagcagcggatcgaactccgccccggcaataaaacagggcggaacttcgcgagtgagatcattattaaacagacagtaatacggtgactcgcggtccgcgtcgttgcttaaatacgcctcttcatacatctgcaaatcctgttgcgttaagccatcccagacaccgcccaacagacgacgagtcacggaatcccgtaatccgtaaagcccataccacagcaaaacacccgcaattttaccgcaatcgatctgtttatcacgcaaccacaacgcactggcgagcgccagcatggcacctgcggaatcaccggcaaagccaatgcgggacatattgatttgataatcctccgcctgctggtggaaataacaacaagcagccacaatttcctctatcgcttgcggaaaacgcgcttcaggtgaaagggtgtaatcaataccaatcaccgtacattggctgtagcttgccagcaggcgcatgatgcgatcgtgggtatcgagattgccgagaataaaaccgcctccatgcaaataaaatagcgtcgccgggctatctggctgcggacaaaagagacgtgtttccacctgcccatattttgttggaaccatgtaagctctggttgccatttctggagcgcccgcattccagaatcggcgctcaagcgtgtaatactgtcgttgctcagcaatcgttcccgttgcgggccaggacggtaaatccggctgaagagtattcacaacggtcttcatttcagcagaaataaggtccagaacaggtagtttgttttccggcttcatacaaaaactcctttcaaattacgtcattgtaaggaaccactgccatgaaaatgcgatcccgcctgctgatattgaaactggctgcgtctcgcgcgctcccgtcagattgtgttaacattcgccgctcagttaaccacccgtaaaaacaaccatgaaatttcccggtaaacgtaaatccaaacattacttccctgtaaatgcacgcgatccgctgcttcagcaattccagccagaaaacgaaaccagcgccgcctgggtcgtaggtattgaccagacgctggtcgatattgaagcgaaagtggatgatgaattcattgagcgttatggattaagcgccgggcattcactggtgattgaggatgacgtagccgaagcgctttatcaggagctaaaacagaaaaacctgattacccatcagtttgcgggtggcaccattggtaacaccatgcacaactactcggtgctcgcggacgaccgttcggtgctgctgggcgtcatgtgcagcaatattgaaattggcagttatgcctatcgttacctgtgtaacacttccagccgtaccgatcttaactatctacaaggcgtggatggcccgattggtcgttgctttacgctgattggcgagtccggggaacgtacctttgctatcagtccaggccacatgaaccagctgcgggctgaaagcattccggaagatgtgattgccggagcctcggcactggttctcacctcttatctggtgcgttgcaaaccgggtgaacccatgccggaagcaaccatgaaagccattgagtacgcgaagaaatataacgtaccggtggtgctgacgctgggcaccaagtttgtcattgccgagaatccgcagtggtggcagcaattcctcaaagatcacgtctctatccttgcgatgaacgaagatgaagccgaagcgttgaccggagaaagcgatccgttgttggcatctgacaaggcgctggactgggtagatctggtgctgtgcaccgccgggccaatcggcttgtatatggcgggctttaccgaagacgaagcgaaacgtaaaacccagcatccgctgctgccgggcgctatagcggaattcaaccagtatgagtttagccgcgccatgcgccacaaggattgccagaatccgctgcgtgtctattcgcacattgcgccgtacatgggcgggccggaaaaaatcatgaacactaatggagcgggggatggcgcattggcagcgttgctgcatgacattaccgccaacagctaccatcgtagcaacgtaccaaactccagcaaacataaattcacctggttaacttattcatcgttagcgcaggtgtgtaaatatgctaaccgtgtgagctatcaggtactgaaccagcattcacctcgtttaacgcgcggcttgccggagcgtgaagacagcctggaagagtcttactgggatcgttaagttatcgtcggttcgtaggccagataaggcgttcacgccgcatctggcatttggctctcgatgcctgatgcgacgctggcgcgtcttatcatgcctacatatttttcatattttacatccggcaaccaccgtttaccccgtcaccacttcacccgccggtggcgtttccagcagttccagcatagtacgggcaatttcacgttcacccatcactacctgattcgcgccacgttcggtgatatacgtcacttcatcgtcataatgggcgcgggcgataatctcaatatccgggtttttcgcgcgggcagacgccacaatctcacccgcttcataaccgttggggatcgtcaggatcagccattttgcacattccagatgcgccagttgcataatttcttcgttcgctgcattgcccaatacagcgcggaccccacgctctcgcagctcatcaacacgggttcgtgacgtctcaatcaccaccagcggaatatcagaggcgagcaatttctcccccagcaggctgcctacacgaccgtaacccaccaatagcgcatggttgcaaatatccactgggatctgtttctcttcttcgattgcctcttccagcgtctgctcttccagcgtttcggtcttcgccagatatttctccagtagtgcgaacagtaccgggttgagcataatcgacaggatcgcccctgccagtaccaggttttgtccggcctgcggcagtaaattcaatgccattcccagtcccgccaggataaacgcgaactcaccaatctgcgccaggctggcggcgatggttaatgccgtacgttgggagtgaccaaacagacggacaaggaacagggccgcgaccgatttaccaaacagaataattgccagcgtcgccagcactgccagcggttgctgaatcagaattaacggatcaaacaacatcccgacggagacaaaaaacagcaccgcaaacgcgtcgcgcaatggcagcgtatcgtgggcggcacggtgactcagttcagactcgttcagtaccatcccggcaaagaacgcgccaagtgcgaaggagacgtcaaacaactccaccgcaccaaaggcaatccctaacgccagcgccagcaccgacagggtaaatagctcgcgagaaccggttgccgcgctgcgtgccataatccacggcaccagacggcgacctaccagcatcataatggcgataaatgcgatcactttgccgatggtgatccccatatcgactgcaagagtggcaaagcccacatcgccctgttccatcattcctgccactgcgggcagcaacaccagcgtcagaaccattaccaggtcttccacaatcaaccaaccgatggcgatttgcccacgctgactgtcaattaattgccgttcttcaagtgcgcgcagtaacaccacggtactggcggtggaaagacataaaccgaacacgataccggtcattaacgaccagcccagcacggcagagagcgccatacccagcagcgtcgccacggctatctgggcgatcgcaccgggaatggcgatggcctttaccgccatcaaatccttcagcgaaaagtgcaaaccgacgccaaacatcaacagaatgacgcccagttcagccagttccggcgcaagcttggtatcggcaacaaagcccggagtgaatggtcctgccagcacacccgctaacagatatcccaccagaggagaaatacgtagtttattggccagcatgccgaggataaaggcgagcacaaggccgccaacaatggtggtgataagcggggtggcgtgatgcattccgtctccttttcctggtggttattgtccatttttggccgggaaaaccaaaattacaggtaatagtttatgacaatttcattgatgatgttcatgaataattattgaattttgcagaaaaatggaattagctgcaaaaaaagcacggatcggaaaacagaaggcggtttaacagaggaaaggcttatggcgactgtaaaacgatgcagccaaagtttgcctttggctgcaatgaaatcagtctttatgccggttatcaggcaggaatatggtcaacatccccaatagtggcaggaaagcacagattttatagactaactcgatgctggtgtgaggtgtactggcaatagcggacactaccatttgttctttttttaagcagccatctgatgatatttttccctgaaggctgccggggagatattccccagacgagagtgacgacgctgacgattgtagaaaatctcaatgtattcccgtattactgagatggcttcatcccggttattaaaacgatagtggctcaggctctcatttttcagcgttccccagaagctttccatcggagcgttgtcgtaacagttacctttacgcgacattgatgttttcagaccagactgctcctgtatgacccggtaatcgtatgcgcagtactgtgaacctcgatcagagtggtggattagcccggcaggtgggcgctggctcctgagcgccataaacagggctttacctgtcagctcttttgtcatgcgctctcccatggcgtagccgacaatttcgcacgtataaacatctttgatgccagcgaggtacaaccatccctcctgtgtggcaacatacgtcaggtccgccacccagacctgatttggtgctgtaggagcgaacgtctggttcagcagatttggcgcaactggcagattgtggttcgagttcgtagtcgctctgaacttgcgtttctgcttacagtgtagccttagctccttacgaagacgtgccagtcggtcacgaccaacgatgatgccattctctgccagctccgtctggagccgccgggttccatatgtttcgcgagtgcggatatgtgccaccttaatctccagttttagccgctcatcactttgttttctgtctgagggttcatgctgtacccagttgtaataaccgctcctggatacaccaaatacctgacacatcgcttcaatgggaaattgttgtcgccattgttcgattaacgcgtatttttcagcgactcctgtgcaaaatacgctgttgctttttttaatatatctcgctcaaggcgagcttcatttaacgccttacgcagttgcagaatttcagattccagttcagccaccgtgcgggaaccaggagtaccgagcccttttctggcggcggtaacccattgtcctaaagtgccttcaggaagagataatcgggaagcgccttcactgatcgaaagttgattttcaggaaccgttctgacagcttcggctttgaactctttagagtaacgttgggtttttctgctcattattagctccttctgatgccattctatttcaggaaggagtgtccgttaaactcaggctacctcagtgtgatcggcgataagccccagaactgccgctcccagacctcccatgccaaaagcaaaaccgaaaaagagtccagaaaccataccgatacgtcccggaagtagctcctgagcgtagaccagaatggcagagaatgccgaagcgaggataaatccaataatcaccgttaaaacccccgtccagtgcaggctggcgtagggtaaaatcagcgtaaacggcgcaacgccgaggatagagccccaaatcacatatttccgtccaattttatcccctacaggcccgccgatcaccgtacctgccgcaacggcaaacaggaaggcaaacagatgaagctgggcattctggatagataatccgaatttttgcatcagataaaaggtgtaatagctgctgatgctcgccatatagaaatatttcgagaaaatgaggattaacagaatgctgactgccagtaccactttgttgcgcggcagtggattgattatcgtcgctttgggttttcctttattcattcggtgctgtgccgagtaccaacggctaatttgcgccaacaccacgatcgccagcagtgccgcaagcacaaaccaggcaacgttgcctttgccataaggcgcgataatcaccgccgccagcaagggtcccagggaactgccaaagttgccgccgacctgaaagatagattgcgccaggccatgccgcccgccggaagccatacgggctacgcgagaagattccggatgaaagaccgatgaaccggtaccgaccagcgccgccgccagcagaactgcgccaaaactgcccgccagcgcaagcagcaccagaccacttaaggtaaagcacatgccaattggcaacgaccacggcatcggatatttatcggtccagtagccgaccactggttgcagtagcgaagaggcgagctggaaggtgagggttatcatgccaatctgcataaatgtcagagaaaattctgactgaagcagcggataaatcgccagaatcagcgattggatcatgtcgttcagcagatgtgagaggctgatagcacctaaaataccaaacgatgttcgggccttggtcgttgacgcagccgcgcccgccacaggctggggttgttcactcattgccataggaaagtcactttttcagggttgcgatgtaaagaatgatcttatttgtgattattacccgactaacatacctgtatgcgtcgtctgaaggaagtctcaacgccgaatacagaatttctaatctggatgcagatttatcttcaccggacgcagacttgtctatgatgtcgcgtcatactatttttcaacacgttgaaatcaggtcagggagagaagtatgaaattattgcagcggggcgtggcgttagcgctgttaaccacatttacactggcgagtgaaactgctctggcgtatgagcaggataaaacctacaaaattacagttctgcataccaatgatcatcatgggcatttttggcgcaatgaatatggcgaatatggtctggcggcgcaaaaaacgctggtggatggtatccgcaaagaggttgcggctgaaggcggtagcgtgctgctactttccggtggcgacattaacactggcgtgcccgagtctgacttacaggatgccgaacctgattttcgcggtatgaatctggtgggctatgacgcgatggcgatcggtaatcatgaatttgataatccgctcaccgtattacgccagcaggaaaagtgggccaagttcccgttgctttccgcgaatatctaccagaaaagtactggcgagcgcctgtttaaaccgtgggcgctgtttaagcgtcaggatctgaaaattgccgttattgggctgacaaccgatgacacagcaaaaattggtaacccggaatacttcactgatatcgaatttcgtaagcccgccgatgaagcgaagctggtgattcaggagctgcaacagacagaaaagccagacattattatcgcggcgacccatatggggcattacgataatggtgagcacggctctaacgcaccgggcgatgtggagatggcacgcgcgctgcctgccggatcgctggcgatgatcgtcggtggtcactcgcaagatccggtctgcatggcggcagaaaacaaaaaacaggtcgattacgtgccgggtacgccatgcaaaccagatcaacaaaacggcatctggattgtgcaggcgcatgagtggggcaaatacgtgggacgggctgattttgagtttcgtaatggcgaaatgaaaatggttaactaccagctgattccggtgaacctgaagaagaaagtgacctgggaagacgggaaaagcgagcgcgtgctgtacacccctgaaatcgctgaaaaccagcaaatgatctcgctgttatcgccgttccagaacaaaggcaaagcgcagttggaagtgaaaataggcgaaaccaatggtcgtctggaaggcgatcgtgacaaagtgcgttttgtacagaccaatatggggcggttgattctggcagcccaaatggatcgcactggtgccgactttgcggtgatgagtggaggaggaattcgtgattctatcgaagcaggcgatatcagctataaaaacgtactgaaagtgcagccattcggcaatgtggtggtgtatgccgacatgatcggtaaagaggtgattgattacctgaccgccgtcgcacaaatgaagccagattcaggtgcctacccgcaatttgccaacgttagctttgtggcgaaagacggcaaactcaacgacctgaaaatcaaaggcgaaccggtcgatccggcgaaaacttaccgtatggcgacattaaacttcaatgccaccggcggtgatggctatccgcgccttgataacaaaccgggctatgtgaataccggctttattgatgccgaagtgctgaaagcgtatatccagaaaagctcgccgctggatgtgagtgtttatgaaccgaaaggtgaggtgagctggcagtaatccgaaagtgccggatatttgcatccggcacaatgcttaatcgcggcgggcgatatcagcaaatttggcatcgaggatcttcgccagatcgcctgccgccagttcgatatccagtccgcgcttgccgccagaaacataaatagtggcaaattcttgtgcgggggcgtcgataatcgtcggcagacgttttttctgccccagtgggctaatccccccaaccaggtatcccgtcgaacgctgcgcggccatcggatcggccatctcaactttcttggcacccagcgcttttgctacttttttaagatccagttgacctgcgaccggcgtaacggccactgccagatgtttcatatcaccgttcactgccaccagtagcgttttgtagacttgatccggattcaaacctaattttttgacgacttcatcgccaaaattggtttcagccggatcgtgctcgtaggtatggatttgaaacgaaatcttgtttttttcgagtaatttaactgcgggtgtcatggtaattttcctgccttaaacaaaaaaacgaagcaagcatacgcctgatggcggtccaaaaaaaagagtcatcttgcctaagagtattggcaggatggtgagattgagcgacaattgagttacaccgtcgcttaaagtgacggcataataataaaaaaatgaaattcctctttgacgggccaatagcgatattggccatttttttagcgcaacatttgcggcaaattcccttctccatacaggtgtagtgcaccgaccgcgaccacatatcgccccggcggcatggcgcgtaatttatcccgccaggcgagatttcgctgatgcatcagcacatcgtacagcgactgactgaacgtattgggcagcgttatatcattattttgcggaggtgcattcagccaccagctcatcatttgttgcagcaaccgtgcgttggtatgccagtgggtcagcgtatcgtccagcagcgccagtcctttgtcagggagctggagcaacatggtaatctggttttcagccccttccagttcaatcacgggtttatgttgttgcttcgccgcctgcaataactggtaatcgataccgtattctgcccgcagccccagtttttgtgcctgcgtcgcctgaagaaccatcgcgatttgccacagcggttgagtagaaaagagcgacggagaaatgcccatctcctggctaatgtgctgcagattttggagttgctcctcgttaatgcgctcttccagcgcctcgcaagtaggcaaattagcaaaaggcgtatcgctggtggaaacatccgcctcgacgatcagcgcatcggcgtttttgagctttttgagcaaacgggtgggcaggggagccatatcgtggctacccatatgaatactgccaatcagatgaaaatggcgattgccgggaagggtgatatcgatggcaggccaggtgtaatgattaccgcgcagcgcggcccaaagcgtttttacccggtacaacagatccatacgacctccctttgtgaaatatcatgctagcgcgcggtgagggatggcgcaaatggagttggggacttgtttaatgtgtttgtatgattcagtatgttcttgcatcgctattcacagggaagcaacagttaaaaaccatgaaacaggcaacaagaaaaccgacgacacccggagatattcttctctatgaatatctggaaccgctcgatttgaaaatcaatgagttagcagagttgctgcatgttcatcgtaatagcgtcagtgcactgatcaataacaatcgtaaactcaccactgagatggcattccgtctggcgaaagtttttgataccacagtcgattttaggctaaacctccaggcggcagttgatctttgggaagttgaaaacaacatgcgcacccaggaagaattgggacggattgaaacagtggctgaatatttggcacgccgtgaagagcgtgcaaaaaaggtcgcgtaaggccaaaacatcgcttcatctcgtaggccggataaggcgttcacgccgcatccggcatccgagcaccattgcctgatgcgacgcttacccgtcttatcaggcctacaaacctgtgcctgaaccgtaggccggataaggcgtttacgccgcatccggcagtcatgcgtcgatgccaaatgcgccgccctaaagcagcgcatccgcaatgacgtacttattccttcggtttaaaccgcagcaaccggttggcgttactcactacggtaatcgacgagagcgccattgccgctccggcaactaccgggttaagcagtgttcccgtaaacggccacaaaataccggcggcgaccggaataccgatgctgttgtagataaaggcaccgagcaggttctgcttcatgttgcgcagcgttgcgcgggaaatcgcgagcgcatccgcaacgcccatcaggctatggcgcatcagggtaatcgccgcggtttcaatggcaacatcactgccgccacccatcgcaatgccgacatccgcctgggccagcgctggcgcgtcgttaatgccgtcgcccaccattgccacctgacgtccttcactttgcagacgtttgatcgcttcggctttaccgtccggcagcactccggcaatcacttcatcaattccagcttctttggcgatcgcattggcggtggttgggttatccccggtcaacatcaccagacgatatcccgttttatgcaggcgttgcagcgccgccacgctatcactacgcaacggatcgcgtacagccagcagggctactgctttcccgtcaatcgccagcagcacaggcgttgctccttgcgatgcctgagcagtaatctccgcttcgatagctttggtaccaacctgttgctcatttaacagcgcctgattgcccagcaataacgcatgaccttcagcttcaccgctcacgcccagcccgcgcaatgtgcggaaaccgttgacctgcggcagctgcatatcacctgctttatcgaggatcgcccgtgccagcggatggctggaaccttgctccagtgccgccgccagacgcaatgcctgcgcttcatcaacatcagcaaacgttttcactgcgacaacctgcggcttcccttcggtcagcgtcccggttttatcgaacacgacggtatcgagtgtactggcgcgttgcagcgcgtcggcgtcccgcaccagcacgccaaactcagccgcccgcccgacgccggaaataatcgacatcggcgtcgccagccccagcgcacacggacaggcgataatcagtaccgtggtggcaatcaccagggtataaacaatttgcggtgccggaccaaagaagtaccagattgccgcactgaccagcgcaatcaccaccaccacaggtacaaatacggctgagattttatccgccagctgaccgatttctggcttgctgctctgggcctggcgcaccatgcgaatgatccgtgacagcgtggtatggctgccaaccgcactggcacgaaacagcacactgccgtcctgtaccactgtcccggcatggacgctttcgccttcgcctttttgctgtgggattggttcgcccgtcagcatcgcttcatccagccatgcttcgccctgggtaatctcgccatctaccggcacgcgatcgccggtcgtcaggcgcagtaacatccctggctgaacttccgccagcggcacgcttttttcaccatctgcggtgaccactcgcgccgtcggtggggttaaatcgagtaatttctccagcgccttagaagaacgctgacgtgcgcgcgcttccagcatatggccgagattaatcagaccgataatcatcgcactggcttcatagtaaagatgccgcgcttccatcgggaaccactgcggccacaggttgacgctcatcgaatagagccacgccacacccgttcccagcgccaccagcgtatccatcgtcgctgcaccgttcagcaggcttttccatgcactgcggtaaaaatggccgccggcgaaaaccatcactgccagggttatcaggccgataactaaccacaagctgcggttgtcagcggtgaccatcatgttatcgccgatcatcccccagaccattaccgggatacccacagccagtgcaacaattgcctgccagcggaagcgcttcatcgtagctacggcggtttcttgctggcgctcgcggcgtttagcgtcatcttcaatcgcttccgcaccgtagcccgctttttccaccgcctgcactaaatcttgtggggaggcactgcccatcaccagcgcagtacgctccgccaggtttacccgtgcctgagtgacgcccggtacgctttgcagcgcattttgtacgcgggtgacacagctggcgcagctcatgccgctcagcagcaactgctggctgtcatcgtcatcggcggtcgctgccggaagcgcctcagaaaccgctgtcagtgcttccgacgggattgatgactccgccagcggtttagcctttgggtggcttacagatgcgtcataacccgcttgtttgatggtttcgatcagctgttctgcactggcagtcccggtaacgtgcgcttcagtgatagacacatccgcctgctcaacatccgggcgctgttcaagactttctttcacgcgtttaacgcagtgaccgcaggacaggccgtccagggtcaggtcgatagtttgtgacataaaacactcctttaagacagttttgactggctgtgataaaggttaaaccttccagcaaggggaaggtcaagaaattaataaaccaggcgggtaaaagtccgtaaagattaaaaaatcggctcgatttgcatcaggattagacatttatttctttgttttcctgtagttaagttgcgggtgctaagttaaatcaggatgcctgaaaatcggcaccggggtgaggaattacctcccgcatctataaaaaggagttaacaaaagatgttagatgcaaacaaattacagcaggcagtggatcaggcttacacccaatttcactcacttaacggcggacaaaatgccgattacattccctttctggcgaatgtaccaggtcaactggcggcagtggctatcgtgacctgcgatggcaacgtctatagtgcgggtgacagtgattaccgctttgcactggaatccatctctaaagtctgtacgttagcccttgcgttagaagatgtcggcccgcaggcggtacaggacaaaattggcgctgacccgaccggattgccctttaactcagttatcgccttagagttgcatggcggcaaaccgctgtcgccactggtaaatgctggcgctattgccaccaccagcctgattaacgctgaaaatgttgaacaacgctggcagcgaattttacatatccaacagcaactggctggtgagcaggtagcgctctctgacgaagtcaaccagtcggaacaaacaaccaacttccataaccgggccattgcctggctgctgtactccgccggatatctctattgtgatgcaatggaagcctgtgacgtgtacacccgtcagtgctctacgctcatcaatactgttgaactggcaacgcttggcgcgacgctggcggcgggtggtgtgaatccgttgacgcataaacgcgttcttcaggccgacaacgtgccgtacattctggccgaaatgatgatggaagggctgtatggtcgctccggtgactgggcgtatcgcgttggtttaccgggcaaaagcggtgtaggtggcggtattctggcggtcgtccctggcgtgatgggaattgccgcgttctcaccaccgctggacgaagaaggcaacagtgttcgcggtcaaaaaatggtggcatcggtcgctaagcaactcggctataacgtgtttaagggctgatcatgatgaacacggaaggtaataacggtaacaaacccctcggtctatggaacgtcgtttccatcggtattggggcaatggtgggggcggggatcttcgcgctgctggggcaggctgcgttgctaatggaagcctcgacctgggtcgcctttgcttttggcggtattgtggcgatgttttccggttatgcctatgcgcgtctgggggcgagctatcccagcaatggcggtattatcgacttttttcgtcgcggattaggcaacggcgtcttttcgctagcgctctcgttgctgtacctgttgacgctggcggtgagcatcgccatggttgcccgtgcttttggcgcttatgccgtgcagtttttgcatgaaggcagccaggaggagcaccttattttgctctacgcgttggggatcattgcggtgatgacgcttttcaactccttaagcaaccatgcggtagggcggctggaagtgatcctcgtcggcattaaaatgatgatcctgttattgctgattattgccggtgtctggtcgctgcaaccggcgcatatttccgtctctgcgccccccagctccggtgcgttcttctcctgtattgggataaccttccttgcctatgcgggctttggcatgatggcgaacgcggcggataaagtgaaagatccgcaggtcattatgccacgggcgtttctggtggcgattggcgttaccacgttgctttatatctcgctggcgctggttttgcttagcgatgtatcggcattagagttagaaaaatatgctgataccgccgtagcgcaggctgcttctccgctgctcgggcatgtgggttatgtgatcgtcgtcatcggcgctttactggcgacggcttcagccattaacgcgaacctgttcgccgtgtttaacatcatggacaacatgggcagcgaacgcgaactgccgaagctaatgaataaatccctgtggcggcagagtacctggggcaacattattgtcgtggtgttgattatgctgatgacggcggcgctaaatttaggctcactcgccagtgttgccagcgccacctttttgatttgctacctggcggtgtttgtggtggcgatccgcctgcgtcatgatattcacgcctcgttgccgattcttatcgttggtacgttggtgatgttgttggtgatcgttggctttatctacagtctgtggtcccagggtagccgtgcgttgatatggattattggctcactcttactcagccttattgtggcaatggtcatgaagcgcaataaaaccgtataacatctctctgtgcgcagtacttcctgtattattgtggtggcggtcgatattcgcactggcaaaaaaacgtgcttgaatatctgttgaaaccctttaacaaagcacaggaggcgttgcgcgaacgatgaacatcagcgatgtagcaaaaattaccggcctgaccagcaaagccattcgcttctatgaagagaaggggctggtgacgccgccgatgcgcagcgaaaacggttatcgcacctacacgcagcagcatctcaacgaactgaccttactgcgccaggcacggcaggtgggctttaacctggaagagagcggcgagctggtgaatctgtttaacgacccgcagcggcacagcgccgacgtcaaacggcgcacgctggagaaggtggcggagatcgaacgacacattgaggagctgcaatccatgcgcgaccagctgctggcactggcgaatgcctgccctggcgatgacagcgccgactgcccgattatcgaaaatctctccggctgctgtcatcatcgggcagggtgattaagacgagacggctcggatatgtagggttatcccttctatcgcaatgacttcaacatgcgtacctgcaccgagatcctcgctggcgctgacaggccatgaactgtcaccgacgcgcatatgaccgcgcccgttgaccagcggagattccagcacaaaacgtcggccaatcagctgctgcccgcgctggtttaaatgactatcgctgtgcttttgttcgcgcacccgccgcgacaaccatttccaccacagccaggcggcgagcagcgtcaggatggcaaacattaccccttgccactcccaacccagcggcaccagccagaccaccaggccggtaatcaccgctgccacgccgctccacaacaaataaccatttccgcccagcatctcggctgccagcagcaaaccgccgagactgagccagaaaatatgtggatgaacgaccattaactccatcatggctgagtccgtttgttggcgctgtctttcaccagctcggcaatcccggcaatcgaccccatcaggctgctggcctctaatggcatcatcactactttgctgttactggaggtaccgatctgctgtaacgcttcggtgtatttctgcgctacgaagtagttcaccgcctgaatatcaccggaggcgatagcttcagacaccattttggtggcgcgggcttctgcttcggcggaacgttcacgcgcttcagcctgtaaaaacgccgactgacgttcgccttccgctttcaggatttgcgactgtttttcaccttcggctttgaggatttccgcctgacggatcccttccgcttcaagaatgtaagcgcgtttggtacgttccgctttcatctgcgcgttcattgaagagataagctctgccggtgggcgcacgtcgcgaatttcaatacgggtgactttaatcccccacgggttggtggcttcatcgacaatacgcagcaggcgtgagttgatgctgtcgcgctgagagagcatttcgtcaagttccattgaacccaacacggtacggatgttagtcatggtcaggttgatgatcgccagctccagattgctgacttcataagccgcgcgcggcgcgtcaatcacctgaataaaacagactgcgtcgatggtaacgttggcgttatctttcgagataacttcctgggaagggatatcgagcacttgctccatcatattgatcttgcgaccaatgcgatccataaacggcaccaccagactgagccccggctgtaacgttttggtatagcgaccaaaacgttctaccgtccattgatagccctgcggcacgattttgacgcccgcgccgacaatgaccagcgcgacaaaaatgagaatcgggataaagataagcatcggaaaaacctcctgttgtaccgtccataatcagcaaaattgctgcttgattaaacaaattatacctgattactgaaagagagttcccccttattcctgcgaaggataaactgtttttagtaaaaatcagaaaaagggaacagcgatgcaggaaaatagtcctttgcttcagctacaaaacgtaggatatctggcgggtgatgcgaagattcttaataacatcaatttttcgctgcgtgctggcgaatttaagttaattaccggtccttctggttgtggcaaaagtacgctgctaaaaatagttgcttcattgatcagcccaaccagcggaacgttactgtttgaaggtgaggatgtcagcacactaaagccagaaatctaccgccaacaagtctcttactgcgcccagacaccgacgctgtttggcgatacggtatacgataatctgatctttccctggcagatccgtaaccggcagcctgacccagccatttttctcgattttctcgaacgcttcgccttgccggacagcattttgacgaaaaatatcgccgagctatctggtggtgaaaaacaacgcatctcactgattcgtaacctgcaatttatgccgaaggttttattgctggatgaaatcaccagtgcgctggatgaaagtaataaacataacgttaatgagatgatccatcgttatgtgcgcgagcaaaatattgccgtgctgtgggtgacacacgataaagacgaaattaatcatgcggataaagtgattacactgcaaccgcatgccggagaaatgcaggaagcacgctatgaactcgcataatattactaacgaatcattagcactggcattaatgctggtggtggtggcaatcttaattagccataaagaaaaactggcgctggagaaagatattctctggagcgtcggacgagcgataattcagctgattattgtcggctatgtgctgaagtatattttcagcgtggatgatgccagcctgacattattgatggtgttatttatctgctttaatgcggcgtggaacgcgcaaaaacgcagtaaatatattgctaaagcttttatctcatcgtttattgccattacggtcggggcgggaattaccctggcggtgctgattctctcagggtcgattgaatttatcccgatgcaggtgatccctatcgccgggatgattgccggtaacgccatggtagcggtggggttgtgttacaacaatttagggcaacgggtcattagcgaacagcaacagattcaggagaaactgagtcttggtgcgacgccgaagcaggcttcagcgatattgattcgcgacagtattcgcgcggctttaattccgacggtcgattcagcaaaaacggttggcttagtgagtttaccaggaatgatgtccgggctgatatttgccgggattgatccggtgaaggcgattaaatatcagattatggtgacctttatgctgctctcaaccgccagcttgtcgaccattattgcctgctatttaacctatcgtaagttttataattcgcgccaccagttggtggtgacgcaattgaagaagaaatgatgcgatgccggatgcgcagcatcgcatccggcgttgtggttcatgtgccgatcaacggaatatcaatacaacaatgcatacagctggcggcgatacttcgacgccagtgcatcacccgtacccagcgcagcgaggatctcctggaacgttttacgcgtctgaccgtctgcggcggtgagatctttacgcagatgcccgaacagcaactccagcgcctcttcattgcgcccaacctgatgcagttgcagcgccagttgcgtcgccagtgcggcatcttctggattctccgccacctgctgttgcaactgttgaatttccggcgtatcagccgcctgcttcagcagttcgatttgcgccaccatcccctggtagcgggtgtcctgatcctgtaacggaatggttttcagcaccgcttctgcatcttcagaacggttcagcgcaatcagcgtttctgccaacagcaggccgatctccccgttctgattcgacaactgccaggcgtctttcagcaatggcagggcatcggtgaaattgccttcctgcatcagttgcatcgcctgctgcgctttcagctcttcttcgcgcggcagcactttatccagcagggcgcggatcgcctcttccggttgcggcccctggaagccatctaccggttgcccgttctggaacagatacaccgtcggaatcgcgcgcagaccaaactgggcggcaatcatctgctccgcatcgcagtccagcttcgccagaataaattgcccgttgtactgcgccgcaaggctttccagaattggggttaactgcaaacagtgctggctacgttcagaccaaaaatagaacagcaccggagtggtcatcgactgttcaagaacctgttgcaggttagattcgttaatgttgacaatattttctacggacatggagtcgctctctgttgtcgatattttctttgacatgggggcttaagcgcgcgcttcaactcacccctgcaatattttgtccatcacgcgccccggcagcaggcgcttaagcaccattactgcccaagtcaccagcgttaccggatagcgcatcttcggcttctcgctaataaaagcatggcgtactttgtccaccaccgcttccggtcccaacgtaaagcgggcggcgatgccgggattttcgactggtttatcactttgcgtctggttgacgttgtcggtgaagcgagtacgaatgggaccgggttcgatcaggctgactttaattccgctgtggcgtagctccatgcgcagcgcgtctgaccatgcctccagcgcatatttactggccgcgtaagcgccacgacccggtgtggagattaatcccatcaccgatgatgtcatcacaatacgcccttcaccgtgcggtaacatcgcgggtaacaggcgcatggtgagctggtgtgcgccgaaaaagttggcggaaaactgctgttccatctgcgcgcggctgatggtggaaagggggccatacatgccgaatccggcattgttaaagatcccatacagacaattatcggtcagggcgatcacttcgtcggctgcgcgatcaacactttctggcgaatccagatcgatcaacacgccggtaaatcccatgctgttcatacgctcaacatcatccggtttccggcaacctgccagcacatgaaaaccctggcgttttaattcgagcgcgctttccaggccaattccactggaacatccggtaattaagaccgatttttgcataactttacctgtcaggatctccgttgctttatgagtcatgatttactaaaggctgcaactgcttcgccatccagtcggcaataaacggctgggcgtcgcggttgggatgaataccgtcatcctgcatccattgtggcttgaggtagacctcttccataaaaaagggcagcagcggaacatcaaactctttggcgagtttggggtaaatggcgctaaaggcttcattataacggcgaccatagtttgcaggcagacgtatttgcattaacaatggttcagcgttggcggctttgacatcctgcaaaatctggcgcagcgtttgctcggtttgctgtggctgaaaaccacgcaaaccgtcattgccgcccagttcaaccagcacccaacgcggctgatgctgtttcagcagagccggaaggcgcgccagtccttgttgcgaggtgtcgccgctgatgctggcattaactaccgacgttttactctgccacttatcattcaacaaggcaggccaggccgcgctggcagacattcgatacccggcgctcaggctatcacccagaatcaataacgtgtccgctgcggcggcacggaaggttaacagggccaggaacaggaagggcaaatgccagcggaaaacattgttgaagttcatcatcttaagaagtccgtcggtcagggggagcatgaactctccatcctcaccggagttgagctggttgtcaaacgtggcgagaccatcgcactggtgggcgagtcgggatcgggtaagtcaaccttgctggcgatcctcgccgggcttgatgacggcagcagtggcgaagtgagtctggtgggacaaccgctacataatatggacgaagaagcgcgggcaaagttgcgcgcgaagcacgtcggctttgtttttcagtcatttatgttaattcctacccttaacgcgctggaaaacgtcgagcttccggctctgctgcgcggtgagagtagcgcggaaagtcgtaacggggcgaaagcgttgctcgaacagttagggctgggtaaacgtctggatcatcttccggcacagctttccggcggtgaacagcaacgagtggcgctggcacgagcctttaatggtcgacctgatgtgctgtttgccgacgaacccaccggcaaccttgaccgccagacgggcgataaaattgccgacctgctgttttccctcaaccgtgaacatggcaccacgttgattatggtgacccacgacctgcaactggcggcacgctgcgaccgctgcttacggctggtgaacgggcagttgcaggaggaagcatgattgcacgttggttctggcgcgaatggcgttcgccgtcgctattaattgtctggctggcgctaagcctggcggtggcctgcgtgctggcgctgggcaatatcagcgatcgcatggagaagggcttaagccagcaaagccgtgagtttatggcgggcgatcgggcgttgcgcagttcacgcgaagtgccgcaagcgtggctggaggaagcgcaaaagcgcggcctgaaagtcggcaagcagctgactttcgccacaatgacctttgcaggcgacacaccgcagctggcgaacgtcaaagcggtggatgatatctacccgatgtatggcgatctgcaaactaatccccctggcctgaaaccgcaggcgggcagcgtattgctggccccacgcctgatggcactgcttaacctgaaaacgggcgacaccattgacgtgggcgatgccaccttgcggattgccggagaagtgattcaggaaccggattccggttttaaccccttccagatggctccgcgtctgatgatgaatctggcggatgtcgataaaaccggagccgtgcagccggggagtcgggtcacctggcgttataaattcggcggcaacgagaaccagctcgacggctatgataaatggttgttacctcagcttaaacccgaacaacgctggtacggtctggaacaggacgaaggcgcgctggggcgatcgatggaacgctcgcaacagttcctgctgctttcggcgcttctgaccttgctgctggcagtggcagcggtggcggtagcgatgaatcattactgtcgcagtcgctacgatctggtggcgatcctcaaaacgctgggggcagggcgagcgcaactgcgtaagctaatcgtcggtcagtggttgatggtgctgacgctttcagccgttaccggtggggccataggcctgttgttcgaaaacgtgttgatggtgctgctcaagcccgttctgcctgctgcactaccgccagccagcctctggccgtggctgtgggcgcttggcaccatgacggtcatctcgctgctggtggggctacgaccataccgcttgttgctggcaacgcagcctttacgcgtattacgtaatgatgtggtagcgaacgtctggccgctgaagttttatctgccgattgtcagtgtggtggttgtgctgctgctcgccggattaatgggtggcagcatgctgctttgggcggtgctggcgggcgcggtagtactggctttgctgtgcggtgtgctgggctggatgcagctgaatgtacttcgccgcatgacgctgaaatcgctacctctgcgcctggcggttagccgcctgttacgtcagccgtggtcaacgttaagccagctttcggcattttcgctctcctttatgctgctggcgctgttgctggtattgcgtggcgatctgctcgaccgctggcagcagcagctaccgccagaaagcccgaactactttttaattaacatcgccacagaacaggtagcaccgctaaaagcgttcctcgcggaacatcatatagtcccggaatcattttatccggtagtgcgggcgcggctgacggcgattaacgataagccgacagaaggtaatgaagatgaggcgcttaatcgcgaactcaatcttacctggcaaaatacgcggcccgatcataatccgattgtcgccggtaactggccgccaaaagccgatgaagtgtcgatggaagaggggctggcgaaacgcttaaacgttgccctcggtgataccgtgacttttatgggcgatacccaggagttccgcgctaaagtgaccagcctgcgcaaagtggactgggaaagtctgcggcctaatttctattttattttcccggaaggggcattagacgggcaaccgcagagctggcttaccagtttccgctgggagaatggcaacggcatgttgacgcaactcaaccgccagttcccgaccattagcctgttagatattggcgcgattttaaaacaggtcggtcaggtgctggagcaggtaagtcgggcgctggaggtgatggtggtgctggtcaccgcctgcggtatgttgctgttgctggcacaggtgcaggtgggaatgcgtcagcgtcatcaggagctggtggtgtggcgcacactcggtgcggggaaaaaactgctgcgtaccacgttgtggtgtgagttcgccatgcttgggtttgtttctggcctggtagccgcaattggtgcggaaacggcgctggcagtgttgcaggcgaaagtgtttgatttcccgtgggagccagactggcgattgtggattgttctgccgtgcagcggtgcactgctgctgtcgcttttcggcggctggctgggtgccgactggttaagggtaaggcgctgttcaggcagtttgcggggtgatgacaggtgttagattgcctgatgcgctacgcttatcaggcctacgaagagcgtgcaatatattgattttgcaagattgtgtaggccggataaggcgtttacgccgcatctggcatgaacagtgtgcattttggcaataaatatgaaaccaactgtcatgtcggttttttatatctgtattctggtgcaaccattctgttctcacgacaatcgccgtttcagaataccgcccatcactgcgtcttaacccattccgccacttccgcccactcaccgcgaaagacaactttttccgcttttttctcaagctgatagcgatacatcgggtcgtaatattctttaagtaacggcaccagccaggccagatgaccgtcggtgctgtcggtggtgagttgcgttgtcagcgccgtatccagctgggcagcgagttcgttatagcgctgtaaccccagccgacgcttaatagccgaaagtccgtgatgcaggtattcgcaatattcctgccagccctgttcgtcgccgtacgcgtgggtaaaatcatgatgcatacgcaagaaatactcttcgttcaggcgctcaagacggatctcaaacggatcttctaccaccgcaatcgccgcctgagtcattcgctcgcgcaggcattccggcaggtgattcgaaccgatcatccggctttcgtcttccagcacccacaggcgcaaatcctgacgggcgtcggtttttagcatttcggcagccagcaggttttcaaaactcgcctggctaagttgtggttgtaaggtgcgaccaaacgccgaaccgcgatgacgcgctaacccttccagatcaacaccgttcggctgttgctgcactaacagcgttttaccgctgccggtacaaccgccaatcagcactatcggtttttgtgccagttcaatagtcgcctgaatcgcggcttggcgcagtgccttataaccgccttccaccagcggataatcaatccccgctgcatacaaccagctttgcacaatatgtgagcgctgaccgccacgggcgcagcagagaataccttgcggattttgcaggcacgctgcccgccaggcgtccatgcgctgctgacgaatttcacccgccaccagtttatgccccagcgccagcgccgcgtctgagccttgctgtttataacaagtgccaacggcggcgcgttcatcgttattcattaacggcaggttgatagcggcgggcattgcgccttgctcaaactcgataggggcgcgaacatcaataatgggcgtatcagcaatcagcagggcacgatagtcctgttccgtgtgtctctcttgcatagttaaaagtgaacctcaaatcagcttgcgcgctattttacgcgccaacgcgcaaggaaacttgatttttaactgcgtgggttgccgaaaatttctaaaaatccgctgatttccggcctgcgctgggtaaacaaggtcacaatatcttctaccgctttgccgctgccaaatttgcgccatgccagactcaatggcgaaggagggcgcatcgttgggattacccggctgaccagttgttgattatcgatcattgactggcaaagtgattttggcaaaaaaccaatgccaacacccgccagatgggcggcgattttcgtttccatatcgggaacaataatctctttttgccccggcaatcgccaggcgacgcgtttggttaaggttcgggcgctgtcttcaatattgaccgccggaaagcgccgcaactgcgcttctgttagcggctcttcaacgttcgccagcggatgatccgccgccatgacaaagcgccattgcaccgatcctaagggatcaagactaaaggtatttgccagcgcctcagttcccgtgaccccgatagccagcgaaaaaccttcgtacaatagcgagtcccagacgcccatatagatttgtcgggagatgtgaaactgggtaaaggggtaacgctcattcagccacgccagcaactgggcgacggcctgggggttatagagcaggttgttgatgacaatattcacctagcgttccacgccatcattcacctgttgcagctcgctgggcatactttccagccagctcagccagtctctggcctgggaaagtagatgctcgccagccgctgtcaacgtcacgctgcgagtcgtgcggaaaaacagcgccactccggtattctcttccagaagtttaatgcgataactgatcgtcgccgtggttttacataatcgttctgccgcttttgaaaaacttcctgtttcagcaaccgcaatgaaagtccgcaaggtttctggatcgaacatcttcaggtatccccttttaaatccgcaagttgcgtgattttcttatcctctgatttatcagtatttttacatgataaccctgttcaatttgtggactaaatctagttttggaaaaatattccaacttttgtattgatgttgttctcttaaggttttagattgccggtaatgactccaacttattgatagtgttttatgttcagataatgcccgatgactttgtcatgcagctccaccgattttgagaacgacagcgacttccgtcccagccgtgccaggtgctgcctcagattcaggttatgccgctcaattcgctgcgtatatcgcttgctgattacgtgcagctttcccttcaggcgggattcatacagcggccagccatccgtcatccatatcaccacgtcaaagggtgacagcaggctcataagacgccccagcgtcgccatagtgcgttcaccgaatacgtgcgcaacaaccgtcttccggagactgtcatacgcgtaaaacagcgagcgctggcgcgatttagccccgacatagccccactgttcgtccatttccgcgcagacgatgacgtcactgcccggctgtatgcgcgaggttaccgactgcggcctgagttttttaagtgacgtaaaatcgtgttgaggccaacgcccataatgcgtgcagttgcccggcatccaacgccattcatggccatatcaatgattttctggtgcgtaccgggttgagaagcggtgtaagtgaactgcagttgccatgttttacggcagtgagagcagagatagcgctgatgtccggcagtgcttttgccgttacgcaccaccccgtcagtagctgaacaggagggacagctgatagaaacagaagccactggagcacctcaaaaacaccatcatacactaaatcagtaagttggcagcatcacctccttagacaaggaaataagtcagttccagatttacaacgccatcatggacgaaaaatgaagctttcaatctcagcgacggtgcgccccaccttcgcaagaggtcgcttcacgcgataaatctgaaacgaaacctgacagcgcgccccgcttctgacaaaataggcgcatccccttcgacctacgtaacagatggaatcctctctctgatggcagcaaagattattgacggtaaaacgattgcgcagcaggtgcgctctgaagttgctcaaaaagttcaggcgcgtattgcagccggactgcgggcaccaggactggccgttgtgctggtgggtagtaaccctgcatcgcaaatttatgtcgcaagcaaacgcaaggcttgtgaagaagtcgggttcgtctcccgctcttatgacctcccggaaaccaccagcgaagcggagctgttggagcttatcgatgcgctgaatgccgacaacaccatcgatggcattctggttcaactgccgttaccggcgggtattgataacgtcaaagtgctggaacgtattcacccggacaaagacgtagacggtttccatccttataacgtcggtcgcctgtgccagcgcgcgccgcgtctgcgcccctgcacccctcgcggcatcgtcacgctgcttgagcgttacaacattgataccttcggcctcaacgccgtggtgattggcgcatcgaatatcgtcggtcgtccaatgagcatggaactgttgctcgcaggttgcaccactaccgtgactcaccgcttcactaaaaatctgcgtcaccacgtagaaaatgccgatctactgatcgttgccgtcggcaagccgggctttattcctggtgactggatcaaagaaggcgcaattgtgattgatgtcggcatcaaccgtctggaaaatggcaaagttgtgggcgacgtcgtgtttgaagacgcggctaaacgcgcctcatacattacgcctgttccgggcggcgttggcccgatgacggttgccacgctgattgaaaacacgctacaggcgtgcgttgaatatcatgatccacagggtgagtaacatggcgacattttctttaggtaaacatccgcacgttgagctgtgcgacttgctgaaactggaaggctggagcgaaagcggcgcgcaggcgaaaatcgcgattgccgaaggccaggtgaaagccgacggcgcggttgaaacgcgcaaacgctgcaaaatcgtcgccggtcagacagtgagttttgcaggtcacagcgtacaggttgttgcctgatccctttcccggcctgtatcaacaggccggttctcttttcagacttttgccctctacgccccgttcatccatgctgatagcatcgacattttgccgaagcgaccatcatgccaaccgttattacgcacgccgccgttcccctatgcattggtttagggttgagttcgaaagtcatccctccgcgtctgttatttgccggaatcatcctggcgatgctgcccgacgccgacgtattgtcgtttaaatttggcgttgcttacggcaatgtttttggtcatcgcgggtttacccattcgctggtgtttgcgtttgttgtcccgctgttatgtgtgctgattggacgccgatggttcagggctgggctgattcgctgctggctgtttttaaccgtctcgttgctatcgcacagcatgctggattcggtaaccactggcggtaagggtgttggctggctgtggccgtggtcagatgaacgctttttcgctccctggcaggtgattaaagtcgcgccgtttgcattgtcttgttacaccacgccgtacgggcatcaggtgattatttctgaattgatgtgggtgtggttgccggggatgctactgatgggaatgttgtggtggcgcagacgataaccggatgcgaaaactcgcatccggcaatagcgcaattacttacgacgccaggtggtcccttgcgggccatcttccagaacgatccccatctcgttaagacggtcacgcgccgcatctgccgccgcccagtctttcgctttacgggcatccagacgctgttgaattaacgcttcaatctcagccacttcgctgtcgtctgcctgcgcgccgctttgcaggaacgcttccggttcttgctccagcaggcctaatacagcggaaagtttacgcaggtgagatgccattgcattcgccgctgccatatcttctgctttcagacggtttacttcacgcgccatatcaaacagtacggaataggcttccggggtgttgaaatcgtcgtccatcgcttcaataaagcgcgcttcaaacgcttcgccaccggcaggagcaacggttttttctgtgccgcgcagggcagtgtagagacgctccagcgccgcacgcgcctgcttcaggttctcttcgctgtagttcagctggctgcgatagtggcccgacatcaggaagtaacgcacggtttcagcatcgtagtatttcagcacatcgcgcacggtaaagaagttacccagcgatttggacatcttctcgcggtcaaccatcaccattccggagtgcatccagtagttaacatactgaccatcatgggcacaggtggactgcgcgatttcattctcgtggtgcgggaacatcaggtcagaaccgccgccgtggatatcaaagtggttacccagctgcttgcagttcattgccgaacattcaatgtgccagcctggacggcccgcgccccacggagacggccagctcggttcgccctctttcgacatcttccacagaacgaagtccatcgggttgcgtttgtcgtcgaccacgtcaacgcgcgcgcctgcctgcagctggtcgagatcctgacgcgacagcacaccataagtcggatcggtcgggacgtcgaacatcacgtcgccgttgtccgccgcataagcgtgacctttggcgatcagttgttcagtgagttcaataatttctgcgatatggtgcgtcgcgcgcggctccatatccgggcgcagaatgttcaaagcatcaaaatctttgtgcatttcggcgatcatgcgatccaccagcgccacaaagctttcgccattttcattggcacgtttgatgattttgtcgtcgatatcggtaatgttgcgcacatacttcagtttatagccgaggaaacgcagatagcgcgcaaccacgtcaaaagcaacaaaggtacgcccgtgaccgatatgacagagatcgtaaacggtgattccacacacatacatgccgacttccccggcgtgaataggcttaaattcctctttttggcgtgtcagagtattgaagatttttagcatcgaagattccgtttagacatgtgtgggtaattgagttgcgtataatacccatatttcccgcgcgaatcagcatacattgcgtgatgatccgatcgtgcggttatgctataacaccaccctatatatgacccgaactgggttgaagcaccaatcaaacggaacaggatgcaaaaatggttactttccacaccaatcacggcgatattgtcatcaaaacttttgacgataaagcacctgaaacagttaaaaacttcctggactactgccgcgaaggtttttacaacaacaccattttccaccgtgttatcaacggctttatgattcagggcggcggttttgaaccgggcatgaaacaaaaagccaccaaagaaccgatcaaaaacgaagccaacaacggtctgaaaaatacccgtggtacgctggcaatggcccgtactcaggctccgcactctgcaactgcacagttcttcatcaacgtggttgataacgacttcctgaacttctctggcgaaagcctgcaaggttggggctactgcgtgtttgctgaagtggttgaaggcatggacgtggtagacaaaatcaaaggtgttgcaaccggtcgtagcggtatgcaccaggacgtgccaaaagaagacgttatcattgaaagcgtgaccgttagcgagtaatcgtggcgacactctttattgcagatcttcatctctgcgtggaagaaccggcgatcaccgccggttttctgcgttttttagcgggggaagctcgcaaggccgacgcgctgtatattcttggcgatctgtttgaagcgtggattggcgacgacgagcccaatccactccatcgccagatggcggcagcgatcaaagcggtgtccgattctggcgttccctgttatttcattcatggcaaccgtgattttctgctcggcaaacgctttgcccgtgaaagtggcatgacgttattgccggaagaaaaggtgctcgaactttatggccgccgggtgttgattatgcatggcgacacgctgtgcaccgatgacgcgggttatcaggcttttcgcgccaaagtccacaaaccctggctgcaaatgctattcctcgccctgccgttgtttgtgcgcaaacgcattgccgcgcgaatgcgagcgaacagtaaagaagccaacagcagtaaatcgctggcgatcatggacgttaaccaaaacgcggtagtcagtgcgatggaaaaacatcaggtgcaatggctgatccacggacatacccatcgcccggcggtacatgaacttatcgccaaccagcaacctgcttttcgcgtggtactcggtgcctggcatacggaaggttcgatggtgaaagtcacggcggatgacgttgagctgattcattttccgttttaaaaaaaccgcaactttgctgatttcacagccacgcaaccgttttccttgctctctttccgtgctattctctgtgccctctaaagccgagagttgtgcaccacaggagttttaagacgcatgtcttcccgcaataatccggcgcgtgtcgccatcgtgatggggtccaaaagcgactgggctaccatgcagttcgccgccgaaatcttcgaaatcctgaatgtcccgcaccacgttgaagtggtttctgctcaccgcacccccgataaactgttcagcttcgccgaaagcgccgaagagaacggttatcaggtgattattgcgggcgcaggtggcgcagcgcacctgccaggcatgattgccgccaaaacgctggtgccggtgctgggcgtgccagtacagagcgccgcactgagcggtgtcgatagcctctactccatcgtacaaatgccgcgcggcattccggtgggtacgctggcgattggtaaagctggcgcggcaaacgcggcattactggcagcacaaattctcgcgactcacgataaagagctacaccagcgtctgaatgactggcgcaaagcacaaactgatgaagtgctggaaaacccggacccgcgaggtacggcatgaaacaggtttgcgtcctcggtaacgggcagttaggccgtatgctgcgtcaggcaggcgaaccgttaggcattgctgtctggccagtcgggctggacgctgaaccggcggcggtgccttttcaacaaagcgtgattaccgctgagatcgaacgctggccggaaaccgcattaacccgcgagctggcgcgccatccggcctttgtgaaccgcgatgtgttcccgattattgctgaccgtctgactcagaagcagcttttcgataagctccacctgccgaccgcgccgtggcagttacttgccgatcgcagcgagtggcctgcggtgtttgatcgtttaggtgaactggcgattgttaagcgtcgcactggtggctatgacggtcgcggtcaatggcgtttacgcgccaatgaaaccgaacagttaccggcagagtgttacggcgaatgtattgtcgagcagggcattaacttctctggtgaagtgtcgctggttggcgcgcgcggctttgatggcagcaccgtgttttatacgctgacgcataacctgcatcaggacggtattttgcgcaccagcgtcgcttttccgcaggccaacgcacagcagcaggcgcaagccgaagagatgctgtcggcgattatgcaggagctgggctatgtgggcgtgatggcgatggagtgttttgtcaccccgcaaggtctgctgatcaacgaactggctccgcgtgtgcataacagcggtcactggacacaaaatggtgccagcatcagccagtttgagctgcatctgcgggcgattaccgatctgccgttaccgcaaccagtagtgaataatccgtcggtgatgatcaatctgattggtagcgatgtgaattatgactggctgaaattgccgctggtgcatctgcactggtacgacaaagaagtccgtccggggcgtaaagtggggcatctgaatttgaccgacagcgacacatcgcgtctgactgcgacgctggaagccttaatcccgctgctgccgccagagtatgccagcggcgtgatttgggcgcagagtaagttcagttaagcaggtgctcatttgattgccggatgcggcgtaaacgccttatccggcttaccgctccggtacccattgtaggcctgataagacgcgtcaagcgtcgcatcaggcatggtgcaccgattgccggatgctctcatcactacagcgaaatacaggtccccgcttcgcccgccagcgtctcttcaattcgcgataacgccccaatccacgcgggtttaccacggcttctgacataaccactcaccgccgttaccttcggccccatcgaaccatcggctttggcaaatggcgctaactcatccggtgtggcatggcgaatggcacgttgctgcggcgttccccagttttcatataccgcatcagcatcggtgaggatcaccagtccatcggcattaatctgctcggcgagcaacgcagcggcgagatctttatcaatcactgcttcactccctgccccatcttccgtcacaggcacacctccgccgccactgcaaatcaccacatgcccctctttgagcaacaactcgatggcttcgctgtcgagaattttacgcggttgcggagacgccaccacccggcgcaaatatttaccatcacgtttcatctgccagccgtaagccgcttccagtgcctcttgttcttctggctgataaaccggaccaataaatttctctggctgcaaaaacgccggatcatcaggcgaaacctcaatgcgcgtcagcaccgtcgtaacaggcggcatctgcggctgtgcgctcaagctctgcgccagcatatagccaatcatcccctggctttccgccaccagcacatccagcggatacggttctacctctttccacgccagattctgtaacgccagcagccccacctgcggcccgttgccgtgaacaatcgccagccgataagaacgggccaggcgtgccagcgcgggtacagcactggcgatattgcgatattgattttccgccgtcagcgcctcaccgcgctggagtaaggcgttgcccccaagagctacaaccagtgttttcatggttttccttgtaataattgttggccaagccagaaccccagcagcgtatctgcccctgacgtatgccccagcgccagcagcgaatcaatcgcaacagcggtacgtttcgggcaactcagagcatggacaaagtgcaggagtggcgaggcgaaatatccttgcgcggcataacgtaaataactgacgctcaccgctgtggtaacgagttgaagattgtcggaataggcaaaaaactggcgtaactcagcaggcagcggatcgcctgccgccaacgccagtggcccgaaaagcccggtttcctccgcgcgttgcatccatgcagctgcaagcggttgaggatgcgcaggcggcgtaatacgcagcaaacaataacgctgtggctgtttaaccgtgaaacgcccgaggcgaatcccttgagccacaacctgtggtcgttcattgccgcataatccaccgcataacgcatcgaattgcgcgcggcgaagcacccatcctccggggccgaaaccactaccctgacgatgcagcgttaacagttcgccgctttccgtcatcaggttaatcgcccgtcgccacactcccgctaaccgccaggactggcgataattcggtgcactacggctggcaagcagaggatggatgatcgtcattgcgcgttcctcaaccaatccccatgctttcagccagtgcttccagcgcctgttcaaaacacgccagcggtgcccgcacagtgcctgcgccaatctgcccgatccccgcctctttatgggcgataccggtattgatgagtggcgtaatgtcggtttctaccacgcgacgaatgtccagtcccaggcacgcgccctgaaaatcccagcctgggatctgcaactgcatattgcgctcaaggtaaatttccgccatctcttcagataccgctctggccgcttccatgccacccgcaccgacaaagcgcgttacgccaggcgctgcgatcattgccgcacctccgataccaaaggtttcggtaatcgcgctatcgcccatatccgggttcgcctgctcctgcgagaagccggtgaaaaacagaccttgcggagtgtttacaggcgcagtaaaccagcgttcgcccagcccgcttacccgaatcccgaacatattgccgttgcgggtcattgccgtgacgatgctgcctgcgcggatcatcgcgccagcatccatcgccgccttgcagtaagccatcgcgaggttgaggaagaactgatcggtcacgctgaggaaatccatcacttcggcgatgtgctgtttatcatgatcgaggcgagcaatttgtggggccagcgcacgcattaacagtgcagaggaagcaatattgcgttgatggaactcatcgcccatcgtaatgccctgcgccatcatcgccgtgagatcgataccgcgctccatgcgccccagcgccgcgcttaatactggcattaacacatcgcgcatccagcgatggcgagtcaggacatcttcgccgtaagcgccaaaacgcatcactttgccgataccttcgttgaggttgcagtacgcccggttgccgtcggtcacgttctcgaccaccagcatcggcatactggcagaagtaataccgcccattggaccgacggcattcacatggtgacaaggaatgaagttcacttccccctgctccagtattgccagcgcctgcgcttcatctttcgcccagccttcgaacagacatgcgcccacgcacgcccctttcatgggtccggtcatctcctgccagcgcattggcggcccggcgtgaagcagtgttttgccctcgtttagttcgctgataagtgaagaagccggttgcacatccagccagtgtggacgagcgcgacgaatttgttcgataaccgcagcattggcttgcgccactgatgtaaacatgggaaccccttattgcaaacgttctaataaacgagccaggtaatgactccaacttattgatagtgttttatgttcagataatgcccgatgactttgtcatgcagctccaccgattttgagaacgacagcgacttccgtcccagccgtgccaggtgctgcctcagattcaggttatgccgctcaattcgctgcgtatatcgcttgctgattacgtgcagctttcccttcaggcgggattcatacagcggccagccatccgtcatccatatcaccacgtcaaagggtgacagcaggctcataagacgccccagcgtcgccatagtgcattcaccgaatacgtgcgcaacaaccgtcttccggagactgtcatacgcgtaaaacagccagcgctggcgcgatttagccccgacatagccccactgttcgtccatttccgcgcagacgatgacgtcactgcccggctgtatgcgcgaggttaccgactgcggcctgagttttttaagtgacgtaaaatcgtgttgaggccaacgcccataatgcgtgcagttgcccggcatccaacgccattcatggccatatcaatgattttctggtgcgtaccgggttgagaagcggtgtaagtgaactgcagttgccatgttttacggcagtgagagcagagatagcgctgatgtccggcagtgcttttgccgttacgcaccaccccgtcagtagctgaacaggagggacagctgatagaaacagaagccactggagcacctcaaaaacaccatcatacactaaatcagtaagttggcagcatcacccataaatccggtcgccacaaagctgcgacgataacgcgtattccccgcgccctgctgcggataaaaaacatccgtgccccgaatcgcaccgtaggtattgctgatatttaccagacctgtaatcaccgccgtcagaataattcccggcgacaaagcaccgccactgccgagcgggaaccactgccagtgcaactcaccggagagcgaatgcgaagaaggaaagcaaaagtaccacaacaaccagccggttatggtgccgaccagcaggccataacgggcaaaacgttgcggcagaaagataatcatcgccagtaccaggcacatcaccgccaccgagagcgcgaacggtggtaactgaattttaaaatatgggtcggctatgccaaacggcagcccgagcatacctttgaaaaagatagtggtcagctgtgcgcccagcatcaacataaacaagaccatcaccgacggcgtaaataaccgtgccaggcgatggcctaatccgctaaaaccaatcaacatcgtcagcacgccggagagtgcaatccccaccgccagactggtagcgatatcgttgatcggtgtcccgcgcgatgcttcgccaagggtgatagtaaggatggttccccaccacaggccacccggcccttccataatagcgcgacgatgaccgcagaacgcctgagcgaagcaggccagtgcggtagcaagaaaagcatattgcgtgagcgtaagcaggctactttgcggcaactgaaaagcagaaagtagcgtaggaggaaccacaaccgtgttgcaaaaaataaagaaaaaccactgaaatcctgataacaggctttcgcggctgactgcaaaattgaacataaacacaccttaaccggagaatgcccgccgcaaggacgggcattgcaggggccagattactgctgatgtttaaggataaattgacctttcggcgcaacagggaagccctgttcaatgtcgtaaatcacatcaccacgtaagatggttttcgtgatacgcgcgccaatggtacggccaacatacgggctgactttgtggcgatattccagatcgtcattggtaagaacatagctgctattcggctgaatgaagacgaagtcggcatcttttcctggggcgatacggcctttttgctgcagaccgaaaatatctgctgcgttagtcgccattaatttgccgaacattggcagagacattccgcgtttctgtaccgcttcatcgaacatcacgtccatacagttttgcagaccggcaataccgccccatgcttccatgatgttgccggctttcatttccggagggcatggtgagtggtcggaaaccaggcagtcgatttcaccgttaaacagtttttcccacatgcctttctggttttccagatcgcggatcggcggtgaacacttcgccagagtaccgatttcttcgaactgatcggtatccagtacaaagtaatgcgggcaggattcacaggtaacatcctgaccttcctgacgtgcacgagtcacttcttcaacactttccgggctgctgatatggcaaacgtgcagacggcaaccggcaactttcgccagatacagcacgcggcgaatcgcttccacttcggtaaataccggacgcgaagccacatagtcatgggcagttacgcgaccttcacgtttcgcttcttcgcccagtgcgtcacagatcagcgcgttttcgcagtgcaccaacaccggctgccccagttcgcccagcttctgcgcacctttgaagaactgccagtcgtttacatcacggaagtcgttgtcgataccgcgatcgccacaggtcgcaacgaagcatttgaagccgacaacgcccacttcatccagctcatgcagacggtcgatgttgtaagacaccaggccaccgagttgtgccgcatcgatagtcagcttgcctttagcggcatcgaacttcagttcaattgaagcgcggtcaaccgttgcaggcagctggttgagcggcatttcgatcatggtggtgataccaccttttgccgctgcgcgagtaccggtttcataaccttcccagtggctacgacccggttcagaaagtacggatccatccagcgtaaaccggcttccgtggtggtttggggtttatattcacacccaacccaaccgttgtagtcagaattttcgattaccttaaagagataatcataattaatttctccggtccccggttcgccgcgatgcggattatcagcaatttgcaggtgaccaattttatcggcccactgagtcatggtgttggttaattcaccttccatccgctgcatgtgataaatgtcatactgaattttcaaattgcagcaaccaacatcatcaatcaatttcagcgcctgccgagttccggtgagatggaaaccaggaatatcaaaatggttaataggttcaatcagtaataaaatatcttctttcatcagcatattcgcggcataacgcaggttttctacaagcgttgcgtgaatctgttcactgctgaaaccagccggcgttttaccgaccagacagttaatttttttattccccagcgcacgggcataacgaatcgctgctgctacgccatcccgaaactcttcttcacggccaggaatacaggcaataccgcgctcccccgccgcccagtcacccgccggtagattgtgcagcgtatgttcgagtttattactcgccagcacctgttttaattcttcaatgtcgtagtcataaggaaacataaattcaacgccgcgaaaaccacactgcgcagctttctcaaaacgggcgagaaaatcatattcaccaaataacatcgataaattagcagagaaacgtaacattatttatctcccttattcatagtgcatgaagcaggtttcagtcggtgcgtccactgcgttatcggcgatatcttcaaattccatgacgttatccagttcgctgcccatcgaaatattggtcacacgctcaagaataacttccacgactaccggtacccgatattgcgccattaaggctttcgcctgttcggtgatgctgccaacttactgatttagtgtatgatggtgtttttgaggtgctccagtggcttctgtttctatcagctgtccctcctgttcagctactgacggggtggtgcgtaacggcaaaagcactgccggacatcagcgctatctctgctctcactgccgtaaaacatggcaactgcagttcacttacaccgcttctcaacccggtacgcaccagaaaatcattgatatggccatgaatggcgttggatgccgggcaactgcacgcattatgggcgttggcctcaacacgattttacgtcacttaaaaaactcaggccgcagtcggtaacctcgcgcatacagccgggcagtgacgtcatcgtctgcgcggaaatggacgaacagtggggctatgtcggggctaaatcgcgccagcgctcgctgttttacgcgtatgacagtctccggaagacggttgttgcgcacgtattcggtgaacgcactatggcgacgctggggcgtcttatgagcctgctgtcaccctttgacgtggtgatatggatgacggatggctggccgctgtatgaatcccgcctgaagggaaagctgcacgtaatcagcaagcgatatacgcagcgaattgagcggcataacctgaatctgaggcagcacctggcacggctgggacggaagtcgctgtcgttctcaaaatcggtggagctgcatgacaaagtcatcgggcattatctgaacataaaacactatcaataagttggagtcattaccttcgtggtgtacggctttattcttccgataatatgtatccagatagccagcaagggtttgccccaacggtacgtgggattgcccgtacggcggcccagctaacgattcggcaaaatggttttattatctatcaaagctatgtttcccccggtgcttttgaaattactgatttgcacccgacatcttcaaatggcgatctggatgtcaccatcgacgagcgcgatggcagaattacacaattccgtattcaacagtgccgattttacaacgcgaagggcgtttcaaatttgacctgacggcgggcgattttcgtagcggtaatagtcagcaatcatcacctttcttttttcagggcacggcactcggtggtttaccacaggaatttactgcctacggcgggacgcaattatctgccaattacaccgcctttttattagggctggggcgcaacctcgggaactggggcgcagtgtcgctggatgtgacccatgcgcgcagccagttagccgacgacagtcgtcatgagggggattccattcgcttcctctatgcgaaatcgatgtacaccttcggcaccaattttcagttaatgggttaccgctattcgacacaaggtttttatacccttgatgatgttgcgtatcgtcgaatggaggggtacgaatatgattacgattacgacggtgagcatcgcgatgaaccgataatcgtgaattaccacaatttacgctttagccgcaaagaccgtttgcagttaaatatttcacaatcacttaatgactttggctcgctttatatctctggtacccatcaaaaatactggaatacttcggattcagatacctggtatcaggtggggtataccagcagctgggttggcatcagttattcactctcattttcgtggaatgaatctgtagggatccccgataacgaacatattgtcggacttaatgtttcagtgcctttcaatgttttgaccaaacgtcgctacacccgggaaaatgcgctcgaccgcgcttatgcctccttgaacgctaaccgtaacagcaacgggcaaaatagctggctggcaggcgttggtgggaccttactggaaggccacaacctgagttatcacgtaagccagggcgatacctcgaataatgggtacacgggcagcgccacggcaaactggcaggccacttacggtacgctgggggtcgggtataactacgaccgcgatcaacatgacgttaactggcagctgtctggcggtgtggtcgggcatgaaaatggcataacactgagccagcctttaggggataccaatgttttgattaaagcgcctggcgcaggcggtgtacgcattgaaaatcaaactggcattttaaccgactggcgcggctatgcggtgatgccgtatgccacggtttatcggtataaccgtatcgcgcttgataccaatacgatggggaattccatcgatgttgaaaaaaatattagcagcgttgtgccgacgcaaggcgcgttggttcgtgccaattttgatacccgcataggcgtgcgggcgctcattaccgttacccagggcggaaaaccggtgccgtttggatcactggtacgggaaaacagtaccggaataaccagtatggtgggtgatgacgggcaagtttatttaagtggtgcgccattgtctggtgaattactggttcagtggggagacggcgcgaactcacgctgcattgcgcactatgtattgccaaagcaaagcttacagcaagccgtcactgttatttcggcagtttgcacacatcctggctcataaaggaaattatcaatgaagataatctgcagattattattggcaatggcatgtttgtgtctggcaaacatatcctgggctactgtttgtgcaaatagtactggcgtagcagaagatgaacactatgatctctcaaatgtctttaatagcaccaataaccagccagggcagattgttgttttaccggaaaaatccggctgggtaggtgtctcagcaatttgtccacccggcacgctggtgaattatacataccgtagttatgtcactaactttattgttcaggaaactatcgataattataaatatatgcaattaaatgattatctattaggtgcgatgagtctggttgatagtgtgatggatattcagttccccccgcaaaattatattcggatgggaacagatcctaacgtttcgcaaaaccttccgttcggggtgatggattctcgtttgatatttcgtttaaaggttattcgtccctttattaacatggtggagatccccagacaggtgatgtttaccgtgtatgtgacatcaacgccttacgatccgttggttacacctgtttataccattagttttggtggccgggttgaagtgccgcaaaactgcgaattaaatgccgggcagattgttgaatttgattttggtgatatcggcgcatcgttatttagtgcggcagggccggggaatcgaccagctggcgtcatgccgcaaaccaagagcattgcgatcaaatgtacgaatgttgctgcgcaggcttatttaacaatgcgtctggaagccagtgccgtttctggtcaggcgatggtgtcggacaatcaggatttaggttttattgtcgccgatcagaacgatacgccgatcacgcctaacgatctcaatagcgttattcctttccgtctggatgcagctgcggcagccaatgtcacacttcgcgcctggcctatcagtattaccggtcaaaaaccgaccgaagggccgtttagcgcgctggggtatttacgcgtcgattatcaatgaggtacggagaatgagaagagtactctttagctgtttctgcgggttactgtggagttccagtggatgggcagctgaccctttgggaacgattaatatcaatttgcacggtaacgttgttgatttctcctgtaccgtaaacactgcggatattgataagacggtagatttaggcagatggcctacgacacaattactgaacgctggcgataccacggcactcgtcccttttagcctgcggctggagggatgtcctccgggttcagttgcgattttatttacgggaacgccggcatccgataccaacctgctggctctggatgatcccgcaatggcacaaaccgtcgccatcgaattacgtaatagcgatcgctcccggctcgcactgggggaggcgagcccgactgaggaagtagatgcaaatggcaatgtcacactaaacttttttgccaattatcgagcgttagccagcggtgttcagccaggtgtggagaaagcggatgcgatatttatgatcaattataattaatattatattaattcgtataatttggcgtagtcgataagctctacaattgaatgcaaacctagtttgccataaatattagatttatgcgcactaactgttttattgctaagtaataacttatcggcaatttctttattagataatccgctaaccagataacgtaatatggtcacttcacgattagatagcacagtgaccgttgaactattcgtactacatttattgctttttatatagttgagcgtttcgctaggaaaaaacgtgtatccggagaggatcatctgaacgggatgaaaaatatcattctgatcattgcatttactgacaaaaccgttagcaccagcttgtatcgctctgccagcataaaagcattctgatttcgatgataaaaataacactttcactgtgctctggatttgtttgatccttttcaggaaggtaaaaccgtctgttccgggcaagtctatatccataatgattaaatcaacaggacgggttcggagataatcgatggttatgcggtaatcatccgttttcaggacaatctgcaattcactgtttttttgcaacagaacttcaatagacattctgggtaatgactccaacttattgatagtgttttatgttcagataatgcccgatgactttgtcatgcagctccaccgattttgagaacgacagcgacttccgtcccagccgtgccaggtgctgcctcagattcaggttatgccgctcaattcgctgcgtatatcgcttgctgattacgtgcagctttcccttcaggcgggattcatacagcggccagccatccgtcatccatatcaccacgtcaaagggtgacagcaggctcataagacgccccagcgtcgccatagtgcgttcaccgaatacgtgcgcaacaaccgtcttccggagactgtcatacgcgtaaaacagcgagcgctggcgcgatttagccccgacatagccccactgttcgtccatttccgcgcagacgatgacgtcactgcccggctgtatgcgcgaggttaccgactgcggcctgagttttttaagtgacgtaaaatcgtgttgaggccaacgcccataatgcgtgcagttgcccggcatccaacgccattcatggccatatcaatgattttctggtgcgtaccgggttgagaagcggtgtaagtgaactgcagttgccatgttttacggcagtgagagcagagatagcgctgatgtccggcagtgcttttgccgttacgcaccaccccgtcagtagctgaacaggagggacagctgatagaaacagaagccactggagcacctcaaaaacaccatcatacactaaatcagtaagttggcagcatcaccgacattctgatgataggatgagtatccataatgatcaccgacgttggtttcatagttaccagtctcataggagcggacaattttccgttagggcggtaaattgtactttgatacatgaaaatacgggttttcttgattcaaacgcgcagcggtgtgcatttgtttgccgctatagcgtaataaatcagaaaatcagacgcggtcgttcacttgttcagcaaccagatcaaaagccattgactcagcaagggttgaccgtataattcacgcgattacaccgcattgcggtatcaacgcgcccttagctcagttggatagagcaacgaccttctaagtcgtgggccgcaggttcgaatcctgcagggcgcgccatttcttcttcatttaaccccgtcttatccgttccgctttgctcttcaccacatcactttttgtcgctgtttggcgagataattcaacggtgtcaggccgtaaaacgccttaaaaacagagataaagtacgacgtgctgctatagccacataattgcgccacctgagtgatatttttgttatccatcaataacatctgtacggcgtaacgcatacgacactctgtgacaatctggctatagctgatattttcgttttttaatttctttttgagcaggctggggcttaaacatagcgaactggcgacaattcgcagattccagtaatgctgaatatcgctttgaataatgcggcagacgctgtcgcggacgctgctgcgtaagatatacatcagtagggcaataaaccgcgattgctcaagaaagttagacaatacggtaaaaagcaatgcgcgcgtcaactccgcttcgcagggtttgctgggttgctgcttgctgtggttggcggctagccggaacacttccggtgtacggctatgacaagcgataaccggggttgccagccgcgaccagggctttacacaggttaagttcttatttaaaaacaacagataatcgttgatgatgttacggttgatgtgggtgattaatacgtgatttaacgttgagagttcaatgacgttattgttgcacgcgaaggcggccaggtagtttttcggaagggtaaacgtagcatggttattgacgcttacctctacctctttttcggtcaggatcaccacgcaaggttcactgctgctcaattgcatttcgcactcctcagatatcagaaactccgctcaaaggatctatgcttcctgcatgagtgatcggcccgttcgccgataacgatcttctttctttagcacgctttttagcaattaatcttgatggaattctgacgagagcgaaagaggtaagccaggtcgtacccgacttacctggaggagatttaatactcgagaatgccgtgcgcgacgggcaaatagcgcagagagaaatagagagtgtctttaccgcaagaggaacgtttcgctaacagcgaggcgatctctgcatccggtttcggtttcgctgtaaaggttttgcctttgccggcgacaaacagttcataaacaatgccgcttgctggggcggagctttggcaatcggcgctggcctgtagataacgttcacgctgttcagcggtaagtttatccacgccgctgccatcctgtacccagacattaactccggttgctttaacttgttccagcagttggcgatagccatctggcgacatgtttccggcgaaaaaactactgatataaaccggttttgctgaaacatcgctaatcagccgctgcgcgttgtttaaccatgttagcaaaggctgacgggcagcttcgctgcgccagttcaggtcgtcaatttccgccctgatgtaccagccatccggcgttatgccaggcgcggcgctccataatctggcttgctggagatcggcagccagcaggcgattaagatagctttccagcgctgcggacgactgtttctggtgcataaaaaattccggatcggcgttcagcccgacaatcagtttcaggccagcctgttgcgcagctgcggcacgcttaaacaataacgtgcgctgttctggctgggtaaatgcatcgccgtaacgggtccattgcaaaaccagggtatcgaagccttgcaaacgtaactgactcatcagcccctgccactgggtatcggtaacctgactatctcggttttgtggttgccagataatacctttcatcgcaaaggaaaaagggctgaccaaaagcagtgtcagcaatacgaaaatgaacttacgcatttaccagtgcactccaatggtgagaaacgcgttgttgcgctctccgttacgttgattaatcgccttaaaggtatgttgatactcgacgccgagactgactttgtgcggccaggcgtcgtagtgcgtctcgccggtccagatattccagcggaccccgactccgccaagctgcgcgccctgagtgcctttatcacgatagccgttgtcctgaacgtgagcgtaaggctcaatagtctgtccgttagctaccttctgatgccagctgacgcgataatctgccgtccacgcctgaatatcctggcggatatattgcgccgcatcgaggtacaggttttgggcaaaccagcctgaaccgttcgggtgccattcgtcgctgtatttgccgccattaaagaatgaggcgctggcgcgcagcatggtatcggatgcgccattttgcccgttcagcggcaactgctgttcgacggcgaggaaaaagatctgatcgcgcagcggcttccagcgcagaccggtgccggacatcggatttttcaccggcatcatcaccccgttttctccggtatcggcaaagacgcggctataaactgagagcaggtcgccttccagcagcatattgcgtccgatgcggtactcggcttccagttgcccgtagctacgatagcttttccctggcgctgcgccgccaacattattgttagcggtactcattgccccggaacgcaagccgatagaagaatcgaaactgaacgtccagcggcgaccgacctcctcatgcaaacggcggaaattgaagcgttgttgattttgctctggggtcagtggggttatcagcgcctgattatcaatgtcatcaatcaccagccgggcgtagtgctgcgtcgcaggcatgtcatccagacgctggttcacgtaggccagttgtcggatcagtgccggatcgtccggaagccttttatgcgcctgttcgagcatttcccgcgactgtgcgatatcaccgctatcccacaaggcgtaaccaagcgctgcctggatgttgctattattcggttccagttccagcgcggcgcgcaaatcactcaccgcggccgggacattatgacgttggcgataaattgtcgcccgcgcaacgtaagcgttggcagaaggcgcaatattgattgagcgcgtgagatcgttcagtgcgagttccggctgaccaggaatgtaacgttgtgcatgcagccaccagtagagggcattgcttcccagtccacgttgttctgcctgttgtagccagcgatcgcgagccgcaccatttcctgccgcctgggcggtattggcagcagcaagcagatcctcattgctcatgtcgtgaagactgattttctgccaggccgccagtgcggtggcgtagtcctcaacctgatacgcctgataggctaccgcacgatgttgccaggcgctcggttgtcgttgttcggcctgaagccatgcatacaacgccacaccgggtagcgtgtcccgataacactttgccagacggttccaggcggcagcatcgtaggaaggcgacatatcgcccagcaagcgaactattgccgggcaattatctgcaatacccggcaactgactttgccactgacgttgctccgccagcggtaagggtttcgataaaatcgccaccttcgccggcgttgccaggtaaggatgactttccagcagagacgccagtcgcgccattaaagtctggctgacacgcgcatcgccctggaaaggatagcgttgcagcaataaatcggcagcttcgcgtgactgctcgttctgcatcagttgccaggtcagttgatccaggcgggtaagatttgccggttcttgctgatacagcaatcgtgccagacgcagagattcagccttgttacgggtcgccacgctgacagcataacgctcctcaagcatttcattggcggggagggtggcgagcagtttttgcgctgcgtcgtactgaccttcttttaacagcaccggtagcgtcgcgccaacaacatactggcggttatcggcaaactgcaccgtataattcgccaatgcctgaacggggttggcgctgtatttagataacagatagagccaacttttctcttgtgcgtccgtggtaaacagcggcttattttcattgagataatgctggaggcgtgctttttcgccacgataagccagcgcggtcgcgtaagtaatatatgactgaggatcggtgaagatcccctgtgattgcagtgctaggatccgatcgtccagctgcccggcaagaagcacgtcaaaccactgacggcgttctgccgcgcttaatgtgttctgctggcgtgcttcattgtatagcgtatctgcctgggaccattgtttcaggtagattgcccgttgcagcagatcggttcgcagcgtttttccttccggcgatgcagcaaacgtcgcatcgttcagttgcgctctggcgacaggtaactgtgcaagccgcagggcattctgcccgacttcactgcgacaacgcagggtcggcgcagcatcgcacgctttttgctgggcaagcagttcttcaacagttgtaacgcttttcacttcaaccggaatagccgccagactgcgctcaagtcgggcatctcctgggtgacgtttcagttgatcctcaagcaacagccgcgcccggtcatcatgaccaaaatggcgataggcttccgcaaggtataaagtcagcggaatattatccggcacctgctggtgtatatattcaaattcgcggatggcggttgcttcgtcgttatttttctgtgccttcagcgccttatcgagacggggataaataacaaaatggcgataatcgctcagccccagctcttctgcgctggtgccgatattgtctgcgagtgcgctggtactcaataaagacgtcagcagtaaaccagaccatccgatgacgcgattaaggttattctccttcattttcggactccagttgcgcaacctgttctgtgtttaaacctgctttgagtaatagtgattgcatcgaaacttgtaattcgcgttgaattgtcaggacgcgatccaacgtttcctggctgataacgccttcggtgaccaaaaacttgccgagcggcagagaactgcgttcatggcgcaataacaacacgttaattgctgaacgattaatatgaccgagcgtggtcagtatttcggcgaacaggaactgatgcggcacatattgccgccagatttcaccggcctgctgttccgtgagccactgatgctgaaccgcattgtacaacattgcccgcggatcgtgaccgcgtcggcgtgcataccagtgacgtaaccccgtgacaatttgtccccgcagaacaatgaagtaacgcactttgcgtccgactttacgcgtcagggccgccagcgaaaccgggtcaataccatcttcactgccgacaattaactcatcattttccagacgcagcggcagtaccgcataatgcagcgccacggaggccggcatttcggcaatcagcgaggaagggatctgccaggcatcgatggattcccacgccacgccgttttgctctgccagcgcctgtgccagctgctcggcgctaatcagcccctgcatcagcattgaaccgcccaagcgtagaccttcgacgcgattacgcagtgctgtatcgagttgttcggtaatgactccaacttattgatagtgttttatgttcagataatgcccgatgactttgtcatgcagctccaccgattttgagaacgacagcgacttccgtcccagccgtgccaggtgctgcctcagattcaggttatgccgctcaattcgctgcgtatatcgcttgctgattacgtgcagctttcccttcaggcgggattcatacagcggccagccatccgtcatccatatcaccacgtcaaagggtgacagcaggctcataagacgccccagcgtcgccatagtgcgttcaccgaatacgtgcgcaacaaccgtcttccggagactgtcatacgcgtaaaacagcgagcgctggcgcgatttagccccgacatagccccactgttcgtccatttccgcgcagacgatgacgtcactgcccggctgtatgcgcgaggttaccgactgcggcctgagttttttaagtgacgtaaaatcgtgttgaggccaacgcccataatgcgtgcagttgcccggcatccaacgccattcatggccatatcaatgattttctggtgcgtaccgggttgagaagcggtgtaagtgaactgcagttgccatgttttacggcagtgagagcagagatagcgctgatgtccggcagtgcttttgccgttacgcaccaccccgtcagtagctgaacaggagggacagctgatagaaacagaagccactggagcacctcaaaaacaccatcatacactaaatcagtaagttggcagcatcaccttgtttatttgactacgtgataaacgaaccccatccaggaaacccgtatgcccactaacacgacgaccatcgccaatatagtccatcaaactgctgattttagaacttgcagccaatcccagcggatcaacccacccacaaggattcggcacataccggtaagtctgctccccgccctgcaaccccagcggatcactcaccaggtacattccggtttccggctcgtaataccggaaccgattatagcacagcccggattccgcatcctgccactgtcctgcatacagcaggccggggtcggcttccgggtccagttccccgcgcgggtccgggtagccggtgtctgcgggcaggctgagtgccagcccccacaggctggtctgccccggtcgccagaccgtctttccttcactgttaaagagcatcagcgggcggcccgtcaggtcgctcaccgcatgattcgtccgcgtcacccactgcggggccaccgacggatgcgcctgccgtacccggctgaactgctggcttatcagctcaaagccgttaaacaccaggtgccttacgctgtacagtttatcatcgcggtattcccggatttccgcaatactgtcgccgtcccacagatacgtgaagcggattttcttccggtcgcagcgtttctctgttcgtctgccgctggcgtcgtggcggtattcccacagctcaccctgtgcgctgcaatacccggtcagctggtcccggctgtcccaccggaaccgctctgtttccggtcggtagccgtcacggtgtctggtgcggctgaccatccggcctgcggcgtcatagtcatactgcgtgtttccggcctgtttcagccggtggcctccggcatactggtcagtctcttcacttatccggtgcctgcccgcagactgcgccttcaggtagccgcagctgtcatagccataggactcatcgccttcgccatagcccagcccggtgcctgaggctgtcaccgccgtgacctggccgttccggtccagccgatactcccgccgtgtttcccgtccgtaatcttcccggctggtgacgcctgacacgttacccgcgctgtcgtaacggtactcccgtaccagtgagggaaccagcccgtcccatgtggcttctgccggaaaaaatccggcgcgctgactgacaggctgaccggctgcattccagccctgttcacaggcaaaaccccggttactgtgccggagcacttcacgtcccgcctcatcacggctgaacgtcagcgtctcatcccccggcagaatgacctctgtcagttctccggcggcgttgtagcggtacgtggttttcagcagggattcaccggggtgtctgtcgcgttcatcttccggtggcaggatacagcggatgacggtgtgttcatcggggtagttgtattcaatggcccgtcggccctgagtggtgacattcacccgcccgcgttcgtcatagccggtgcgctgtgatgtgccgtccgggctgaagatacccgtcagcctgccggatttgtcataggcatactgcgttttgccttccggcgagatgatttctgccaggcggcctgcggcgtcccggctgtagaggatggtttcctccaggccgttaaccctggcggtacagaggccatcggcgtcatagcggtaacgccagaccacgccgccccagtcacgctcttccgtcacccggccgcagttatccagaacataaagatatgactcaccctgcgggttgatgacttctgtcagttgcagcgtgtctttatcgtagcggtactgccagcggtggccttcaccgtccgttcgcgccaccggaaaatcgaacggaccgtattccatcgtccagacaacaccgttgccgtccgtccaggccagcaggttgccgtggcggtcatagcgaaatccttccgcgccggttccagcacgttcaatgccgctcagtttatggtgctgctgccactgtaaccgcactgactgaccgccggggccgcgcatcttcactggcaggtcgtgaccgctgtattcggtgtggtgttcacggcccatcacgtcggtgagtgtttccggccggttgtggtggtcgtactctatgcccagacgccgttcatcctggcggaatattcccgacagcagcccctgagcggtgtatgccagccgggtctcttcgccctgtggcgacaccagacttaccggcaggccgcgttcatcacactgctgtgtccacgtctgcccggcagggtcggtgatgttgctgagcaggccgcgctcatcatagcggtactgccactccgcgccgtctgccgccgtgtaacggcttaactgaccgtgtgcggcgttgtattcaaatttctccacccgcccggcaggggagtggcgggccagcaggtgatggaattcatcccattcatacatggtggtgctgccgtccggcgcttcttcccgcagaatattgccgtcaggatcatagtaataacggtgaatgcccttgccgtccgtcacggtggtgcagccgtcaccatagtccagcgtggcgttgtaatagccctccgccccggtgacattcacgcaccggccctgttcatcgtaggtgaaacggctccacgtctggtcgttatcggaccagcggatgatccggtccgcagcgtcgtactcataaaacaggtggtagtccagccgcgcatccgcttctgtcagccgcccccgcgcatcctgttcgtaggtcgccagcgtctgtatgtcgttatccgtgcggtgaatggctttcaggtagccgctggcgtggtacgtcagtttaagccggatcccgtcggtgtgactgacacccgtgatccggtactggctgtcgcgctcaaacgtgatgcggttgctggcggtgtcgctcatcccgcccagcatgtacatccggtcattggggctgtgtgccaggcggtcatcgctggtatcgtcagtcaccgggtggcgcagacgcattcccggaaaggcgtcataaaagaagcggctgctcagtgcatccctgtcgaacagctccagataatcatcgcggcggcgcagaatgtactgggcgtgatacgggttaaccgccgtatcactgtcaccgtcgaaggcaaatctcagcgtggctccctggctgatgatatccacccggtttccctgttcacgcacccaggcgtattcgctccaggagtcgctccagcccacgccggtcaggccatgcagcggcagtacagaactgtggaaacgggtgaaggagagggggagggtctggcccagggtgaagtcggtacgttcgtcgcagtatgcgccggttaccggatcgacaggatctgttacccatctgatgactttattggcaatactttttaacgacttacctgttttccccagcaacgcgccgagctttgcgcccagcagcttcccgcttttccccagcagtttcccagtttgccgagtctcgccagattcttcagttttcccagtagtcccgctggcggcagaagatagctggctatcgttattccccccaggatcattctctgccacggcgggaactccggctggatatccagatatgtgacctgctcaccgccaataaagacgtccggcgaacctcccacgatcgccgcactgcactccagtttgtcgcccttgcgcgcggcaggctgattgttgataaagacgttgctgctgccctgggctatcctcggtggtttgttctccttgtcgcagagcgccgtgtcctcaccggcttccgggaaatccacatcttttttgatttcgccacgcccgcccaccatggtggcaaactccattaataccggaccggcgggaaacagaagcgatgcgccggcgctgacgcgatccataaaaccggcattgctgtccgtcagggtgataacagcgttcccccaggccttcgccagtggtactgctttttccgctgccgattcaagcaggtcagtggcaatatcaccccatgagggttccccctgtgggacttcaggtattgctccaggtgggggaggagggggaagggtgaccgctgcacgtgcggccagctcgccgttaatttttacgttttcagaaccggtattgatggcgccgtccgtgtcacaaaagctgtttatccatgattcaagctggttctgtttctcctccacataatcactcgccttatagctggcatacatcagcgcaggtaccagaaccagcgcataagggccggtggcacaggcggccataatcaggcaaccttctgcgatggtcactatcgcccccagtacggcccctgccagcgcccccaaaaaactcttgtgctgaatttcatcgcccagcctggcggcgggggggccagacttttttgatgccaacatctgtgcaatggctttgtcgttggctgcccgtttcatctggctggcgaccatcgcctgctgtgacagcattcgcattgccagcgtaccgcctgcggtcgctccctgtggcccgcctggtccttcactcatgtgttatccctcgtttatgtcagcgcggctggtccttttggatgtcattctccggtggcaacggggtgaagctctttatcacctccagcagcatcgtcttttgactgttcttcagggataaggaggtgctgaaagtgaaggtcagcagcgtatctccacgccgctggaatacggctatctggctaatccgcccctgattcccctcatcttccggaccgttccaggaataatccagcagccaggccggggcctctgccagagtgatttcccggcaggcatgttcggtgtacccatcaagtttgccctggtacagcgccagcgtttcctggtacagctctggtgtcagggttccctgtggaacggcttcgcgggtaatgaccaggttgatgccactgttatctgtggacaccaggacctgcattgactgatcctgccattgagacggcagttgaatgtggccttcattaaaagtgaactgcataaaatactccctgataatctgagtgaatcagttgatgaaaacagaaccgcccacgatggtgatgccatccttcgacagcctgattaccgtcgattccccgacctgtagctgaatgctatccggcgtcagcgcaattttgctttcctccacggccagcaaaatttccttaatcgccgtataagcctgtataccgtcgccttcgccaccattgtttacagcgtcaacatgcaccgaaccggcaatcgtgcctctgtcctgaaagacatcctcagataaagaccctttcagtactccggtgatcttgtggcctttttccaccgtaagaaggcggttaccttcctggatcgtgaccgtctggtcattttttacggtttcgcggtgatcgtgttttacggtggtggtacggtcgttgagcacttcggtatccatgttcttctgcgcgtggatgtagacctgttctctccctgtcgcatcatcaaacttcagctcattaaatccgctgcccatgtacgttttggagcggatggtcatctgcgtctttgttcccggcaggctgccgggggggcggttttcctggtggtaggtgcgccccataatgatcggctggtccggatcgccgttgaggaagtctacaatcacttcctgacccacacgcggtatcgccaggtggccaaaaccggtgcctgcccacgcctgtgccacacggatccagcacgaactgtcttggtctgccgggttataacggtcccagttgaacttcacccgcacgcgaccatgttcgtcgcagaagatttcctcgcctgccggtcctgtcacgacagcgctctgcgggccgtcgaccagcggtttcagcaacggctgtggtcgccatgttctgtctgccgggatcaccgcaaaatggttctccagcgccgtccccgctccctgccgtcctggcaccgcctgtggctgttcgccgtgcagttcacttgccaccacctgccattcccggttcaggttcgcctgcggatgccccgtcagcacaattcgtcgtcccggccatatctccggcgagcgactcattccccgcgcggtttctgcattgtttcgccagccgtccatctgccagcgggcaaagttctgcccgtgagcacccttgaaacgtccggggtagtcatacacttcatactgcgtgcgctggtagtcctggtgctggccttcctgttcaaaacgtccggcccagccggggcgtttaaaggtgtagtctttggtcaccacggaagaagggcggatttgtgcgctgtagcggaactggctgatgcagagggtgctcacctcggtacgggtgttcgggttccatgggatttcaaaagattcgggcagatggcggactgtgtcgcacagcaccaggctctggtcggtacttttgtaagcatgctcctcataaaagaagatgccttcctccgccgccatccggcacaggaaatcgtaatcagtctcaccgtactggacacaaaactcacgggaaggatgcggctcgctgaacagcggactccattcggtcaccccgttttcctgcaacatcgtgccgaggatgcttttgatgtcctcgttctggaagatacggaagttctggcgcagaccggcacgccacagcggcgggtgcaccttcatgctgtacagcatctggtttttgtcgttctccccgagttcaaaccaggtcaccacgcctttcacccggcgctgtacttcatcgccctgccatatcgtcaggtaggccattttgtccagcacctgcgcaaattcaagggagagaaactgctggctgaccagggagagatcgagggaaaagagcgaagagagtgactggttcagatgaaaggaaaccaccgcaaaagcgtccggcggcaggccgtccacttccagtgtgaaacgtaatccggttgacatagcaacctccagtaaaatgaataatgatccgtaccgtacaactgcggataatgtgataagcgggacgacttcagacgttattagggaaggaacagaaaatgctatggttatgtgagaattttgtttaaatattactttacagaaacgggtgtctgttcagtcaaaaaaataatcacaagctcaacctcttgtttcttggcgttattcaggacaggtacgcatatcacaacgagtaacaaaaacgcaaagttaaaccaatattcataatatatttttattcacagcaataaataatccaattaacattattaaaatgaatgattgcataagaaatatatgctaccgctccaccctgataacatgatctgcacattgcacatcttaacgttgttaaatactggctcaatagtggatattttaaattaggaatttatcaaattcacttgacaaatagattgagtgaataatataacaattaatgatgattaatcgcgattaaattattcattgctttatatgatagatggcttgtttataacgatgaaaatttagaaagggcattgtgatctacaattggaagaaacacagatttaactaagtttcatatacaaacatctcgtgaaactttgaaaaataaaagccttcgatatttcatatgtttaataagtttttctctaatttgttgatcaacaataccaggaggtgatgcaccacgccctgaatttgaacttaataatcactctctctccggcagcataatcacaaaccttgtcccccgcgcatctgacgttactgcaaccgtgcctttatgcgcgacaacaatcgatttcactatcgccagcccaatgccgctaccttcgccttttcgctggcgggaagggtcaacgcggtagaaacggtcaaacaatcgcggtaagtgctcgggcgcaatgggcgtaccggggttttcgacggtaacttgcacctggtgatcgaccgtctgacagcgcactacaattgtctctctggttggcgtataacgcagggcattagaaagcaggttgcttaacgcccgacgcagcatcagcggatcgcccgcaacctgacatttgtcgccaacaaatcgcaactccacgccgcgatcttccgctaacgcctcgaaaaaatcgaacactttgccgacttcatccgccaggttgagcattttcttttcggggattagctggttgttatcggcctgagcgagaaacagcatatcgctgaccattttcgccattcgcgtcagctcttcgagattagagtagagcacatcttccagctccttctggctgcgagactggctgagggcgatttccgtttgcgtgatgagattggtaatcggcgtgcgaatttcgtgagcgatatccgctgagaaattggactggcgggtaaagacatcctcaatacgctcgatcatatggttgaacgacagtaccagctgttccagctcaatgggctcggtctgcgggtcaaggcgaacgtcgagatctttcgaggtgatattctggatttgacggctgacgctgcggatcggcgcgtgacctttatgtaccgccaatagcacgataaagacgatcaggatgctgatgacagatgcggtcataataagtttattcatcaaatcatttatgtaatgaagatgaaaatcgatcgaaagcgcgatgtagagcgtataaatcggtttgccgtccaccaacgggccaaccggcaagttaatcatccgccagttgctgtgttccatatgcccgtgaccgtggcctggcatcataatcgtcgggccggaaaggagatacacctcgccaccctgagcgtctttatcgggtatggcgtcacgcgtaaactcgcggatatccggcgcaccgggggagtgatacaccgttttgccgtggctatctgccagggaaatcaacacgttggaataaccactgacgatatcttccagcgtcattaagcgtcgggcttgcgtctcgtcaggatgattaagtacccgttcaagggtggcgctaatttcttttaaatcattaatatcctgctcggcaaaatgcactttcactgagtggatcatgatccatgcaaaggcgaaaaacgccgcgatggtggccaggctgataaaaaaggtcagacgggttgccagcgaaaacgggcgctgaaatggcttactgaccatccggcacctcaagcatatagcccacgccgcgcacggtctgaatcagcttcggctcaaagtcgttgtcgattttgccgcgtagccgcttcaccgccacatcaatggcgttagtgtcgctgtcgaaattcatgtcccacacctgcgaggcgataagcgagcggggcagcacttcgccctgatggcggagaaaaaactccagcagagtaaactctttactggtcagagtgatgcgcgtgccgctgcgggtgactttgcggctgacgagatcgaccatcagatcggcaacctgaaactgactttcgataatcaccgccgccccgcgccgcaggagagtgcgcacccgcgccagcagttcagcaaaagcgaacggcttcaccagatagtcatcggcccccaactccagccccttgacgcgatgttcaatggtgccaagcgcggtaagcaacagaatcggcatccctttattggcggagcgcaacatgcgcacgatatcccagccgttcacgtccggcagcataatatcgaggattatcaggtcataatcaccggtcatcgccagatggtagccattcagcccgttgtcggccaaatcgaccacaaaaccggcttcggttaaccctttggtcaagtattctccggttttcttttcatcttcgacaatcaacagtttcatttttcctccgcatgttgcccgggcaattctagagtagcgggatcagatggcaatcgcttattggcaaaatgacaattttgtcattttcctgtcaccggaaaatcagagcctggcgagtaaagttggcggtataaaatcaccagaaattatgagcctatgtctccttgtaaacttctgccattttgtgtggcccttgcgctaaccggttgttcattggcaccggattatcagcgtacggcaatgcccgtgccgcagcagttctcactcagccagaacggcttggttaacgcagcagataactaccagaacgtgggctggcgcaccttttttgttgataatcaggtgaagacgctgattagcgaggcgctggtgaataaccgggatttgcgcatggcgacgctgaaagtgcaggaggcacgggcgcaatatcgtctgaccgatgccgaccgctacccacagctcaatggcgagggcagcggcagctggagcggtaatcttaaagggaataccgccacgacacgggagttttcgaccggccttaacgccagctttgacctcgattttttcggtcgcttaaagaacatgagcgaagccgagcgacaaaattatttagccactgaggaagctcagcgcgcggtgcatattctgctggtttctaatgtcgcgcaaagctatttcaatcagcaactggcgtatgcgcaattgcaaatagccgaagaaacgctgcgtaattatcagcagtcatatgcgtttgtcgaaaaacaactgttgaccggtagcagcaatgttctggcgctggaacaggctcgcggggtgatagaaagtacccgcagtgacatcgctaaacgtcagggggaactggcgcaggcgaataatgcattgcaactgttattgggaagctacggcaaactgccgcaagcgcagacagtaaacagcggcagcctgcaaagcgttaaattaccggcgggcttgtcgtcgcaaatcttattgcagcgcccggatattatggaagctgaacacgcgttaatggcggctaatgctaatattggtgctgcgcgtgcggcatttttcccgtctatcagcctgaccagcggaatatcaaccgccagcagcgatctgtcttcattatttaacgctagcagcgggatgtggaattttattcctaaaattgagatccccatttttaatgccggacgcaaccaggccaatctggatatcgccgaaattcgccagcagcagtcggtagtgaattatgaacagaaaatccagaacgcctttaaagaagtggcagatgcgctggcattacgtcaaagcctgaacgatcaaatcagcgcccagcagcgttatctggcgtcgctgcaaattactttgcaacgggcgcgggcattatatcagcacggcgcggtaagttatctggaagtgctggatgccgagcgttctttatttgcaacccgacaaactttactcgacctgaattatgcccgtcaggttaacgaaatttctttgtataccgccttagggggcggttggcagcaataatttttaactccaggagagaataaatgaaaaaagcactgcaagtcgcaatgttcagtctgtttaccgttattggctttaatgcccaggctaacgaacatcatcatgaaaccatgagcgaagtacaaccgcaggttattagcgccactggcgtggtaaagggtattgatctggaaagcaaaaaaatcaccatccatcacgatccgattgctgccgtgaactggccggagatgactatgcgctttaccatcaccccgcagacgaaaatgagtgaaattaaaaccggcgacaaagtggcgtttaattttgtccagcagggcaacctttctttattacaggatattaaagtcagccagtaacccaggtttaatgagatgaaaaaaatcgcgcttattatcggcagcatgatcgcgggcggtattatttctgcggcaggttttacctggtttgcaaaggctgaaccacccgcagaaaaaacgtcgaccgcagaacgtaaaatcttattctggtacgacccgatgtaccccaatacgcggttcgataaaccaggtaaatcgccgtttatggatatggatctggtgccgaaatatgccgatgaagagagttctgcgtctggtgtgcgcattgacccgactcagacgcagaatctgggggtgaaaacggctaccgtcacgcgcggaccgctgacttttgcccagagtttcccggcgaatgtcagttacaacgagtatcagtatgccattgtgcaggctcgcgctgccgggtttatcgacaaggtgtatccgcttaccgtgggcgataaagtacaaaagggcacaccgcttctcgacctgaccattcctgactgggtggaagcgcagagtgagtatttactgctgcgcgaaaccggcggtacggcgacccagactgaaggcattcttgagcggctgcgactggcgggaatgccggaggcggatattcgccgcctgatcgccacgcaaaaaatccagactcgctttacgctcaaagcacccattgatggcgtgatcaccgcgtttgatctgcgcgcgggaatgaatatcgccaaagataacgtggtagcgaaaattcagggtatggacccggtgtgggtcactgctgcgatcccggagtctatcgcctggctggtgaaagatgcctcgcagtttacgctcaccgttccggcgcgaccggataaaacactcaccatccgcaaatggacgctgctacctggcgtggatgccgcgacccgcacgctgcagctgcgtctggaagtcgacaacgccgacgaggcgctaaaaccgggcatgaacgcctggttgcaactcaacaccgccagcgaaccgatgctgctcattccgtcacaggcgctgattgataccggcaacgaacagcgggtgattaccgttgatgccgacggacgctttgtaccgaaacgcgttgccgttttccaggcatcgcaaggcgtcaccgcgttacactctggtctggcggaaggtgaaaaggtggtttccagcggcctgttcctgattgattccgaagccaatatttctggcgcactggagcggatgcgctctgaaagtgctaccaatgcgcattgagggaataaccaatgattgaatggattattcgtcgctcggtggcgaaccgttttttggtgctgatgggcgcgttgtttctgagcatctggggcacctggaccatcattaacacgccagtggatgcgctgccggatctctccgatgtgcaggtgattattaaaaccagctatcccggtcaggcaccgcaaatcgttgaaaatcaggtgacttatccgctaaccaccaccatgttgtcggtgcctggcgcgaagactgtgcgcggtttctcgcagtttggagactcttatgtgtatgtcattttcgaagatggtaccgatccgtactgggcgcgttcgcgggtgctggagtacctcaaccaggtacagggtaagctgcctgcgggagtcagcgccgagctgggaccagatgccacgggtgttggctggatctatgaatatgcactggtggatcgcagcggtaagcacgatctggccgatttacgctcattgcaggactggtttctcaaatatgagctaaaaaccatccctgacgttgcggaagtggcgtcggtgggcggcgtggtgaaagagtatcaggtggttatcgatccccagcgcctggcgcaatatggcatcagtctagccgaagtaaaaagcgcgctggatgcttcaaaccaggaagcgggcggttcgtcgatcgaactggcggaagcggaatatatggtgcgcgccagcggctatctgcaaacgctcgacgactttaatcacatcgttttaaaagccagtgaaaatggcgtgcccgtttatctgcgtgatgttgcgaaggtccagattggcccggagatgcgccggggcattgccgaactgaatggcgaaggcgaagtggcgggcggggtggtgatcctgcgctccggcaaaaacgcccgagaagtgatcgcctccgtgaaggacaaactggaaacgctgaaaagtagtctgccggaaggcgtggagatagttacaacatacgatcgcagccagctcattgaccgcgccatcgacaacctcagcggcaagttgctggaagagtttatcgtggtggcggtagtctgtgcgctgtttctctggcatgtgcgctcggcgctggtggcgattatttcgttgccgctggggttgtgtattgcttttattgtcatgcacttccagggactgaatgccaatattatgtcgttgggcggcattgcgattgccgtcggggcgatggtcgatgccgctatcgtcatgatcgaaaatgcacataaacggctggaagagtggcagcaccagcatcctgacgccacgctggataataaaacgcgctggcaggtgatcaccgatgcatctgttgaagtgggtccggcgctatttatcagtctgctgattatcacgttgtcgtttatcccgatcttcaccctggaagggcaggaagggcgtctgtttggcccgttggcgttcactaaaacctatgcgatggcgggcgcggcgctgctggcgatcgtagtgatccctatcctgatggggtactggatccgtggcaaaattccgccggaaagcagtaacccgctcaatcgctttttgattcgtgtttatcatcctctattgctgaaagtactgcactggccgaaaaccacgctgttggtggcagcgctttcggtgctgacggttctctggccgctcaataaagttggcggggaatttttaccgcagatcaatgaaggcgacttgttgtatatgccatcgacgctgccggggatttccgcagcagaggcggcgagtatgctgcaaaaaaccgacaagctaattatgagcgtacctgaagtggcgcgggtatttggcaaaaccgggaaagcggaaaccgccaccgattctgctccgctcgagatggttgaaacgaccatccagcttaagccgcaggatcagtggcggcctggcatgacgatggacaaaatcattgaggaactggataacaccgtgcggctgccggggctggcgaatctgtgggtgccgccaattcgtaaccgtatcgatatgctctcaaccggcattaaaagccccatcggcattaaagtttccggcactgtgctggcggatatcgacgcgatggctgagcaaattgaagaagtagcgcgaacggtgccaagcgtggcttctgctctagccgagcgtctggaaggtgggcgctatatcaacgttgagattaaccgtgaaaaagccgcgcgttacggtatgacggtggcggatgtgcagttgtttgtgacttctgcggtgggcggggcgatggttggcgaaacggtggaagggattgcccgttatcccattaatctgcgttatccgcaaagctggcgcgatagcccgcaggcactgcgccagctaccgatcctgacgccgatgaagcagcaaatcaccctggcagacgtggccgacgttaaagtctctaccggaccgtcgatgctgaaaaccgagaatgcgcgcccgacgagctggatttatatcgatgcccgcgatcgtgacatggtgtcggtggttcacgatttgcaaaaagcgatagctgaaaaagtgcagttaaaaccgggcaccagcgtggcattctccgggcagttcgagctactggagcgcgccaaccataagctgaaactcatggtgccgatgacactgatgatcatcttcgtgctgttgtatctggcattccgtcgggtgggcgaagcgttgctgattatcagcagcgtaccgtttgcgctggtgggcggcatctggttgctgtggtggatgggctttcatctttctgtggcaacgggcaccggttttattgcccttgccggggtcgccgccgaatttggcgtggtgatgctgatgtatttacgtcacgccatagaggccgagccgtcgttgaataatccgcaaacattcagtgagcagaagctggatgaggcgttgtatcacggcgcggtactgcgcgtgcgcccgaaagcgatgacggtggcggtgattatcgccggtctgctgccgattctgtggggaacgggggctggttcagaggtgatgagccggattgccgcaccgatgattggcggcatgatcaccgcacctttgctgtcgctgtttattatcccggcggcgtataagctgatgtggctgcaccgacatcgggtacggaaataaaagcaggataccccgtttaaccgtgtggattgtgtcttgcgacgatgggcactaaatgttaaaaggtgcccctcaacaaaaaagacacacaggggaaaggcgtgaaaaacgcgtcaaccgtatcggaagatactgcgtcgaatcaagagccgacgcttcatcgcggattacataaccgtcatattcaactgattgcgctgggtggcgcaattggtactggtctgtttcttggcattggtccggcgattcagatggcgggtccggctgtattgctgggctacggcgtcgccgggatcatcgctttcctgattatgcgccagcttggcgagatggtggtcgaagagccggtatccggttcatttgcccactttgcctataaatactggggaccgtttgcgggcttcctctctggctggaactactgggtaatgttcgtgctggtgggaatggcagagctgaccgctgcgggcatctatatgcagtactggttcccggatgttccaacgtggatttgggctgccgccttctttattatcatcaacgccgttaacctggtgaacgtgcgcttatatggcgaaaccgagttctggtttgcgttgattaaagtgctggcaatcatcggtatgatcggctttggcctgtggctgctgttttctggtcacggcggcgagaaagccagtatcgacaacctctggcgctacggtggtttcttcgccaccggctggaatgggctgattttgtcgctggcggtaattatgttctccttcggcggtctggagctgattgggattactgccgctgaagcgcgcgatccggataaaagcattccaaaagcggtaaatcaggtggtgtatcgcatcctgctgttttacatcggttcactggtggttttactggcgctctatccgtgggtggaagtgaaatccaacagtagcccgtttgtgatgattttccataatctcgacagcaacgtggtagcttctgcgctgaacttcgtcattctggtagcatcgctgtcagtgtataacagcggggtttactctaacagccgcatgctgtttggcctttctgtgcagggtaatgcgccgaagtttttgactcgcgtcagccgtcgcggtgtgccgattaactcgctgatgctttccggagcgatcacttcgctggtggtgttaatcaactatctgctgccgcaaaaagcgtttggtctgctgatggcgctggtggtagcaacgctgctgttgaactggattatgatctgtctggcgcatctgcgttttcgtgcagcgatgcgacgtcaggggcgtgaaacacagtttaaggcgctgctctatccgttcggaaactatctctgcattgccttcctcggcatgattttgctgctgatgtgcacgatggatgatatgcgcttgtcagcgatcctgctgccggtgtggattgtattcctgtttgtggcatttaaaacgctgcgtcggaaataaggcattcacgctacatccgacaaaacgatgtccgctctcatccattcgatgagagcggtttttttaattactgcttaaatgcacccgccagagagcgaatatcattgccggttggcgactgatgaagtcgcagaccaaactcttcgacaatcgcaaatatgtgatcgaatatatcagcctgaatgctttcatattccagccacaccacggtgttagtaaacgcgtagatctcgagcggtaaaccgttatcacctggagccagttggcgtaccattaaggtcatatctttacgaatccgcggatggttacgcagatattcgttcagataggcacgaaaggttccaatattggtcattcggcgcaggtttaataccgactccgtagaaccttgctggcgattccactcattaatttcctgatggcggctggttaaataaggctttaacaaatgcgctttattcagacgttgcatttcgtcttcatcaagaaaacgaatactggtgacatcaatactgatactgcgcttaatacgtcgcccgccagatgctgacatcccgctccagtttttaaaggagtcagaaaccagagaccaggtgggaatagtggtaatggtattgtcccagttacgcactttgacggtggttaacccaatatcgatcaccgcgccatctgcgccgtatttcggcatctccagccagtcgcccagtttcagcatatcgttcgcggaaagctgaataccggccaccagaccaagaatcggatctttaaataccaacatcagcacggcagccattgcaccaagaccgctgatcagaatcgctggcgactgaccaatcagcagcgagatcatcaaaatgccgaccaggatcgcgccgatcagtttaatcccctgaaatatccctttcagcggtaactgagatgccgccgggaatttctgcgccagattcaaaataacatccagcaacgagaagactgaaagcagcgcatacatcatgatccacaactgcgcgcaggtagtcagaatatctgccgcttcggtgcctttttgcagccagaataccgcctgaatattgacgataatcccctgcagggtaaaagctaaacggtggaagagtttattctgggttatgatttgcaaccaaagccgtgaactggcgatggcacgtttttcgaaggtccgcagtaccacccaatgcaaaataatatgcaccacgacggcggtcagaaaaataataccgaaaatcatcaccatcgaggtggtgtgatcgatctcaatacccgctaaatcttcaacctgggatattaaatcctgcataacgtctcctttatacaacagcagcctatgatgacggctgaaacagggttatgcaaatcaggagaatctgaggggaaatagccgggcagatgcccggcaagagagaattacacttcggttaaggtgatgttttgcggcagacgagatttcggcagcgtagcgttaaaatcttcaacgctgtgatgacctaccggaacaaccaccagactggtgtagcctttctctttcagaccaaattctgcatcgaggatggcggcgtcaaaaccttcgatgggtaccgcgtccagacccagagccgccacgccgagcaggaagttaccgacgttgagataaacctgttttgccatccactctgcatcatcatgcagatctttacggtgcatatcagcgaagaacttgcgacctttatcgttcgcggctttcgcttccggcgtggcaaagcggccatcagcatcttcctggtcaacaaccagcttcagccaggcatcgtccatcgcggtttttgcacagaacaccacgacgtgcgaggcatcaagtattttacgttcgttgaacacataattaccggcagcggatttggcaacacgcgctttaccttcttccgtgctggcaacaataaaatgccacggctgggagttggtgctggatgggctgtattgcaggagagttttgatctgctcggcctgttccggggtaagttttttactggcatcaaatgccttagtggaatgacgctttaaggcgacagaaatgatatccataaagactccatgtgaaagtaattttgcgtgccagcagattacaaggttcaacgagaaatggtaagcgagaaaaatgcgctatagatttccgctttagcctggacgcactcttttttgatcgcgtttagccagaccatcaaccaccagattccacgaatcgttgatcagatcgcgaagtaacgcttcggagatttcctcgccgggatacaccgaaatccagtgctttttattcatgtgataccctggcttaatgctcgggtatatctgctgatttaacagggatttttgtggatcggacttcagattgataaaggggacgccgcgcagctccgacgacagcataaaaattttgccgccaattttaaaaacatcgaactccgggccaaaaggccagcaaagctcgacaaagggtaactcaagggccaggcgtttcgccgtttcgtgcagtgattgcttatccataaacgttcctttaggcgaaggagaataagcaaagtatgccgcgaagtacggcgataatcgacgtttaatccgccagcgagaaccagcgtcgccagataaagcgcagaacaaaatactcaatagcgcccagcactaaaaaccacagacaaaacaataaagtgtaaagctagctaagatccatcagatggaacatggtcaccagtttttgtgccagcgtcagccccagtgcgggggcgggcagcagcaggcaagagaggaaagccatcagcaaaatgcctgctgcggtagtcaaggtttctaaagggtgtttcataacattgttaaatgtaagttaaaacaccattgtcagggatattcttctgtaaggcaattccctacttagtcatcggcccagatctcacaatgctttttcaccagcccaatcagcgagccaccatcggcgacgaaatcgcgcatcagctgcgcttcattcagaccgctgacgacctggcgatgcagggcctcaatcgcgctcgatgcaccaattttatgtgcggaaggggcgattttttccagcaatcgcaaggtgtcttccgttagcggtcgacgatcgccagtgtgcggatcggtaatgacgccttccagcccatagcgacaggcctggaaacggttgaatttatacagcaggtaatctttctcctgatgtttgaacgggcgttctgtcagtaaccagtgggcggtagcctgaattaatcccgccatatttaccgcgtggctaagggttaacggggtatccatcacccgaacctccaccgtgccaaaatgaggactggggcgaatatcccagtgcagatctttaatgctgtcgatcatcgtggtgtaactcaaacagcgaaacagggcttcaaattgttgccagttactgacccacggcatcgggccattatcgggaaaggcggaaaaaatattcggtcgtgaggaggcaaaacgcgtatccgttccttgcatatatggcgacgcggcggaaagggcgataaagtgcggcacaaaccgtgacaagccgtgcagcaaataaatggcgtcatcgccactggcgcagccaacatggacatgctgaccaaaaacggtcgcctgctggatgagatagccaaagttttccagcgttcgttgatagcgctcgttatcgcatacctcctgacgctgccatttctgaaacgggtgtgtgccaccgccgcaaatttccagatgatggtctgcggctgcctgcaatacgactttctgcatcgctgaaaattgcccggcagcctggttgatatcacggcaaacatccgtcgccagctccagcatactttcggtgatatcgtgctttacctctccggccgtgatcttatttttaaccgcgtcaatcagcattgaagagtcctggcttaagtcatagcccggcggattaaccacctgcatttccagttcaataccgagggtaaaaggttcagaaacatgaaaatcgggtaatggcataggtttctcttatgttggcgttttctattcagtatagaagtcggagcggctgggcgagatgcggaagttctggaatgtttctttttttgatgatggtgactgaagcaatttggctactttttcaatgtggcaagttatggcagagctggctgatggcgaagaattttgacgattgaggcatgcagaaaaaacgggctcagcttcagttgattaaatgaggagtgagaagtccgaaacaggatttactgtataaataaacagccattttgttgaggaagggtaagataacggcgggtgcctgaagctttccggtttcaggtttactctgaggtctggaaagatgaagccccaggagatatttctatcaaccctggggctgccactccaaacccgaacaatttggatggtagtcccttcttcgcatggaggcaatataaacatgctgacgaaatatgcccttgcggcagtcatagtgctgtgtttgacggtgctgggatttacgcttctggtcggagactcgctgtgtgagtttacggtgaaggaacgtaatattgagtttaaggctgttctcgcttacgaaccgaagaagtagccgttgtgcggggagtaatccccgcatatccggttgtcaggtcaggatggtagggcacctgctttacactttcgcccgcggtcagtgatggctgcgggcgatttcgttttacgagcaataacgagtgttgccaacagaagtccgaaacaggacttactgtataaataaacagatattttgctgaggaagggtaagataacggcgggtgcctgaagctttccggtttcaggtttactctgaggtctggaaagatgaagccccaggagatatttctatcaatcctggggctgccactccgaacctcaacaactcggatggtagtcccttcttcgcatggaggcaatataaacatgctgacgaaatatgcccttgtggcagtcatagtgctgtgtttgacggtgctgggatttacgcttctggtcggagactcgctgtgtgagttcaccgtaaaggaacgtaatattgagtttaaggctgttctcgcttacgaaccgaagaagtagccgttgtgcggggagcaatccctgcatatccggttgtcaggtcagagtggtaaggcacctgctttacactttcgcccgcagtcagtgatggctgcgggcgaatcgtaccagatgttgtcaattaatcgtgttggcacagagttatgactattttttcttttatctgccagtgcacagcaaacatctcattctcacgatgaatgatgacctgctgtttattccagctaattatctgataatccagaaaacctgcttcagtttgtctctccgatgccttaaatgcgctctctttggcggaaaatgccagtgtcagcgccagagaaaaggctaaaccacagtccgcgagtcgctcgtgttctgctggtgtaataatattgtctgtcaattctcttgcggtttgtacagaaaaaatttcttctatatcaatgccaatcggttgacgagataccacggctaatgccgtagtcccacagtggctaatactgccgtatacctccgcaggccagacaggttggcgtagctcgccgattgcgggcacacatttatagccatattcccgtaaggcataaacagcagcgatccgtccggctaaatgctctgttttacgtttacgtccagcgtgttgcaattgtgcgtagtgcggcagccagagtaaatcctgctcacaaaaattcgccggatcgaactcaacaaaatgcagcgtatgtccggcaaaggggagggaggtatgcgtagttttcatatcgaccatattcgagactgatgacaaacgcaaaactgcctgatgcgctacgcttatcaggcctacatggtcctgcaatatattgaattggcaagatttttgtaggccggataaggcgttcacgccgcatccggcatgaacgacgcgcactttgtcaacaatctgacgttagcatcagaagtgagtgtttacgctcatgtaccacgtacgtcccggctcgttataggtatacgccccggcacccgcgatatagttggcccctgccagatcgcccgtggtctgggcattacccgcacgccacaaacgtttgtcgaacaggttgtccacgccgccggtcagactgacattcttcgtcacatcccaggtcgcgctcagacccacaatgctgtaaggactgatttctttggtttccgggccaaccgctggctgacctttgtagttgtattttttcggctgctgcttaccgtaccaggtgaaggtcgtttgcatcgacaaatcttcccgcgcctgccagctcagcgttgagttcaacgtgtactccgggatgatcgacaaacggtcgcccgtggttttgttttcactcttcagcatataagtgatgttattggtccacatcaccatttcgctaactggtacgtttaacgatccttccagaccttcaaccactgctttcggcacgttatcccactgatagagatcggtgccgactgcgttttgccctacagccacatagcccgcttcaatcttattgcgataatcgttacggaaccaggtgacgcccgccagccagccgtcgcgtttgaactccagaccaatctctttgttgatgctggtttctgctttcaggtcatcgttaccttgctgatagcagccgcccgcgctggcatagcagccctgacctttactgtagagaatgtagttcgggttagtctggtacaggctcggtgctttataagcacgggcaatgcccattttgagcgtgaagtcatcgcctaaaccttgcgatatgttcagcgccgggctccagttattgccgacaatactgtgatgatcgaaacgcagccccggcgttacgatggtgctgtcagtcagctccatgttgttttcggcaaacagcgagaaaatttctgcttttgaatacgggctacggtcggtggcactcacaccatcaatagcgccgccggtgttcgccccggtcagcgcctgggtattggaactcaagtccttcatccgttgctgattccactccgtacccagcgtcagcgtttggttaacgaggaaatcaatcggcaggttaacttcgctgtgcagcatcacgtcatcaagatcgatatcgacgaaatcctgtgtcgctttttcgttaaatttcccttcggtaccgcctgccagaccttccggaatacgcgagttacgggtgtgttcatactgcacccagttgctggtggtcactccgttatcccagccgccgttccaggtcagcgagtagttctggcgatacagacggttggtttcatcgccatatttcgagcgggtataggaatcggagttggtgttctgggtgtcgcccgcatacaggttgccctggcggctgtaacctgcttccagttccagcgattgcaatggcgcgaaatcccagcgcaccacgccattaatatctttgttgatcaccccttcgcgcccggctggtaacgtcgtggcatacgttccggcacgcgcggactgatggccctggttgatatcccacgcgtcagcctgggttttgtcgaggttgccatacaagcggaagctgaattcgtcgcccagcggaccggtcaggctgaagttggtgcgtttagtggcaccttcctctttatgttctggtgcattgaaataagcgtcccaggagccgtgccactcaccgctgccttttttggtaatgatgttaaccacgccgcccgccgcgccgttgccataacgcgcagctgccggaccacgcagaacttcaatacgttcaatcatttcaggtggcacccaggaggtatcaccacgggtatcgcgctcgccacgccagccctgacgcaccgagttacggctgcttaccggcttgccgtcaatcaaaatcagcgtgttttccggacccataccgcgaatatcaatctgtcggttattcccacgctgaccactggtggagttaccggtcaggttaacgcctggcatggtacggatgatctccgacacatcgcgggcaacggggtttttgcggatttcatctgcggtgatggtcgaaacgccaggcgcctgtaagttctgctcggcggcggtaacgacaatggtatcgtcatgtgaaacaggagtatcggtcggctcttgtgcctgcgctaccccataaatccccagattgaccaacaaggccagggaatgaatcttcttgttcattgttttattcctgcatttttgccacgaattgcaactgtcgggcatggtcgtcctcaacacgacgcatcccgctaccgcgaaaacctttgatcctgaaagacacgcagtgcagttggttaataaatgtccgcgcttcccacggcgcgccattacgctattgcaaatgcaaatggttatcaataatattatcaatatatttctgcaatcaatgaaaaattgcacagtaaacatggggttatggtgtgacggcgttaaaagtaggaagtgagagctggtggcagtcgaaacatggcccggaatggcagcgtctgaatgacgaaatgtttgaggtcactttctggtggcgtgatccccaaggttctgaagaatactcgacgataaagcgcgtatggatctacatcactggtgtgaccgatcatcatcagaacagccagccccagtcgatgcagcgaattgcaggtactgatgtctggcagtggacgacacaactcaatgccaactggcgcggcagctactgctttattcccaccgaacgcgatgacattttttctgcaccatcccccgatcgcctcgaattacgtgaaggctggcgaaaactattaccccaggcaatagccgatccgctgaatccacaaagctggaaaggcgggcgagggcacgctgtttctgcactcgaaatgccgcaagcgcctctgcaaccgggatgggattgtccgcaagtgccagaaatagcagccaaagaaattatctggaaaagtgaacggttgaaaaattcacgtcgtgtatggatttttaccaccggcgatgtaacagcagaagaacgtccgctggcagttttgctcgatggcgaattttgggcgcaaagtatgcccgtctggcctgtgctgacttcgctgacccatcgtcagcaacttcctcccgccgtgtatgtgttgatcgacgctatcgacaccacgcaccgcgcccacgaactgccgtgtaatgcggatttctggctggcagtacagcaagagttattacccctggtgaaagctattgccccttttagcgatcgcgccgatcgcaccgtggtcgccgggcagagttttggtgggctgtccgcgctgtatgccggactgcactggcctgaacgctttggctgtgtattaagccagtcaggatcgtactggtggccgcatcgggacgggcagcaagagggcgtgttacttgaaaagctaaaagctggtgaagttagcgccgaaggtctgcgcattgtgctggaagcgggtattcgcgagccgatgatcatgcgggccaatcaggcgctgtatgcgcaattgcaccctataaaagaatccattttctggcgtcaggttgacggcggacatgatgcgctttgttggcgcggtggcttgatgcaggggttaatcgacctctggcaaccacttttccatgacaggagttgagtatggcattcagtaatcccttcgatgatccgcagggagcgttttacattttgcgcaatgcgcaggggcaattcagtctgtggccgcaacaatgcctcttatcggcaggctgggacattgtgtgtcagccgcagtcacaggcgtcctgccagcagtggctggaagtccactggcgtactctgacaccggccaatttcacccagttgcaggaggcacaatgagccagcatttacctttggtcgccgcacagcccggcatctggatggcagaaaaactgtcggatttaccctccgcctggagcgtggcgcattacgttgagttaactggagatgttgatgcgccattactggcccgcgcggtggttgccggactagcgcaagcagatacgttgcggatgcgttttacggaagataacggcgaagtctggcagtgggtcgatgatgcgctgatattcgaacagccagaaattatcgacctgcgaaccaatattgatccgcacggtactgcgcaggcattaatgctggcggatttgcaacaagatttgcgcgtcgatagcggtaaaccactggtctttcatcagctgatacatgttgcggataaccgctggtactggtatcagcgttatcaccatttgctggtcgatggcttcagtttcccggccattactcgccagatcgccaatatttactgcacatggctgcgtggcgaaccaacgcctgcttcgccgtttacgcctttcgctgatgtagtggaagagtaccagcaataccgcgaaagcgaagcctggcagcgtgatgcggcattctgggcagaacagcgtcgtcaactgccgccgcccgcgtcactttctccggcacctttaccggggcgcagcgcttcggcagatattctgcgcctgaaactggaatttaccgacggggaattccgccagctggctacgcaactttcaggtgtgcagcgtaccgatttagcccttgcgctggcagccttgtggctggggcgattgtgcaatcgcatggactatgccgccggatttatctttatgcgtcgactgggctcggcggcgctgacggctagcggacccgtgctcaacgttttaccgttgggtattcacattgcggcgcaagaaacgctgccggaactggcaacccgactggcggctcaactgaaaaaaatgcgtcgccatcaacgttacgatgccgaacaaattgtccgtgacagcgggcgagcggcaggtgatgaaccgctgtttggtccggtactcaatattaaggtatttgattaccaactggatattcctggtgttcaggcgcaaacccataccctggcaaccggtccggttaatgaccttgaactggccctgttcccggatgaacacggtgatttgagtattgagatcctcgccaataaacagcgttacgatgagccaacgttaatccagcatgctgaacgcctgaaaatgctgattgcccagttcgccgcggatccggcgctgttgtgcggcgatgtcgatattatgctgccaggtgagtatgcgcagctggcgcagatcaacgccactcaggttgagattccagaaaccacgctgagcgcgctggtggcagaacaagcggcaaaaacaccggatgctccggcgctggcagatgcgcgttacctgttcagctatcgggaaatgcgcgagcaggtggtggcgctggcgaatctgctgcgtgagcgcggcgttaaaccaggggacagcgtggcggtggcactaccgcgctcggtctttttgaccctggcactccatgcaatagttgaagctggcgcggcctggctaccgctggataccggctatccggacgatcgcctgaaaatgatgctggaagatgcgcgtccgtcgctgttaattaccaccgacgatcaactgccgcgctttagcgatgttcccaatttaacaagcctttgctataacgccccgcttaccccccagggcagtgcgccgctgcaactttcacaaccgcaccacacggcttatatcatctttacctctggctccaccggcaggccgaaaggggtaatggtcgggcagacggctatcgttaaccgcctgttatggatgcaaaatcactacccgcttacaggcgaagatgtcgttgcccaaaaaacgccgtgcagttttgatgtctcggtgtgggagtttttctggccgtttatcgcaggggcaaaactggtgatggctgaaccggaagcgcaccgtgacccgctcgctatgcagcaattctttgccgaatatggcgtaacgaccacgcactttgtgccgtcgatgctggcggcatttgttgcctcgctgactccgcaaaccgctcgccagagttgcgcgacgttgaaacaggttttctgtagtggtgaagccttaccggctgatttatgccgtgaatggcaacagttaaccggtgcgccgttacataatctgtatggcccgacggaagcggcggtagatgtcagctggtatccggcttttggcgaggaactggcacaggtgcgcggcagcagtgtgccgattggttatccggtgtggaacatggggctgcgtattcttgatgcgatgatgcatccggtgccgccgggtgtggcgggtgatctctatcttaccggcattcaactggcgcagggctatctcggacgccccgatctgaccgccagccgctttattgccgatccttttgctcctggcgaacggatgtaccgtaccggagacgttgcccgctggctggataacggcgcggtggagtacctcgggcgcagtgacgatcagctaaaaattcgcgggcagcgtatcgaactgggcgaaatcgatcgcgtgatgcaggcgctgccggatgtcgaacaagccgttacccacgcctgtgtgattaaccaggcggcagccactggtggtgatgcgcgtcagttggtgggctatctggtgtcgcaatcgggcctgccgttggataccagcgcattgcaggcgcagcttcgtgaaacattgccaccacatatggtaccggtggttctgctgcaacttccacagttacctcttagcgccaacggcaagctggatcgcaaagccttaccgttgcctgaactgaagacacaagcgtcgggacgtgcaccgaaagcgggcagtgaaacgattatcgccgcggcattcgcgtcgttgctgggttgtgacgtgcaggatgccgatgctgatttctttgcgctgggcggtcattcgctactggcaatgaaactggcagcgcagttaagtcgacagtttgctcgtcaggtgacgccggggcaggtgatggtcgcgtcaaccgtcgccaaactggcaacgattattgatggtgaagaggacagctcccggcgcatgggattcgaaaccattctgccgttgcgtgaaggtaatggcccgacgctgttttgtttccatccggcgtccggttttgcctggcagtttagcgtactctcgcgttatctcgatccacaatggtcgattattggcattcagtcgccgcgccctcatggacccatgcagacagcgacaaacctggatgaagtctgcgaagcgcatctggcaacgttacttgagcaacaaccgcacggcccttattacctgctggggtattcccttggcggtacgctggcgcagggtattgcggcgcgactgcgtgcccgtggcgaacaggtggcatttcttggcttgctggatacctggccgccagaaacgcaaaactggcaggaaaaagaagctaatggtctggacccggaagtgctggcggagattaaccgcgagcgcgaggccttcctggcggcacagcagggaagtacttcaacggagttgtttaccaccattgaaggcaactacgctgatgctgtgcgcctgctgacgactgctcatagcgtaccgtttgacggtaaagcgacgttgtttgttgctgaacgcacgcttcaggaaggtatgagtcctgaacgcgcctggtcgccgtggattgcggagctggatatctatcgtcaggattgtgcgcatgtggatattatctctccaggggcgtttgtaaaaattgggccgattattcgcgcaacgctaaacaggtaaattaatattatctataaacccataattacagaaaataattatgggttttttatttgtttgatttataggtttgatgaatatttctcttaaatagagtgaatattgcattcagtggaaggaatttacaaacttcagcttcggataattctcaccaactggtaaagtgagcgccgtggagattttcccctattggactcattttcaggttataccccatgtcatcattgaatattaaacagggaagtgacgctcatttttctgagtatcctctggcgtcgcccagtaataatgaaattgatttacttaatctaatcgaagttttatggcgggccaaaaaaacggtcatggcggtcgtttttgcatttgcctgcgcaggtttactgatctctttcatcctgccgcaaaaatggaccagctcagccgttattactcccgccgaagccattcagtggcaggacctggagaaaacctttaccaaactccgcgttcttgatctcgatgttaatatcgaccgtggcggtgcatttaacctgtttatcaagaagtttcagtctgttagcttgctggaagagtacctgcgttcatcaccttatgtgatggaccaattaaaagaggcgaaaatcgatgaactggatttgcatcgcgctattgttgcattgagcgaaaaaatgaaagcggttgatgacaatgccagtaagaaaaaagatgaaccgtcactgtatacctcctggacgctaagttttaccgcgccaaccagtaaagaggcgcagaccgttttgagcgggtatatcgattatatctctgcgttggtggtgaaagagtcgatagaaaacgtccgtaataaactggagatcaaaacccagtttgaaaaagaaaaactggctcaggatcgcattaaaacgaaaaatcaacttgatgcaaacattcagcgcctcaattattcactcgacattgccaacgcggcaggaattaaaaagcccgtatacagtaatggtcaggccgttaaagatgaccccgatttctctatttctctcggcgcagacggtattgaacgcaaactggaaattgaaaaagcggttactgacgttgcggaactgaacggtgaattacgtaatcggcagtatcttgtcgagcaattaacaaaagcaaatgtcaacgatgtgaattttacgccgtttaaatatcagttaagcccgtcattgccagtgaaaaaagacggtccgggtaaggcgattattgtgatcctttccgcgctgatcggcgggatggtggcttgtggtagcgtgttattgcgctatgcgatggcatccagaaaacaggatgccatgatggcagaccacttagtttaactatttgcggttgaaggtgccgttcgtccgagcggcaccacaagcggcgttccggctaccggatcgtcaatgatcatgcatcgcagaccataaatgcgctcaatcagttcagcagtgacaatctccttcggcgctccctgagcaacaattttcccttcccgcaatgcaatcaaatggctggcgtaacgacaggcctgattaagatcgtgcagcaccgccgccagggtatagcctttctcgcggttcagttcgcttaacagttccagtagatcaatctgatgactgatatccagccaggtcgtgggttcgtcgagcagcataattgccgtttcctgggctagcaccatcgcgatccacgctcgctggcgttgtccgccagaaagggtatccacgctttgatctgccagatgagttattctcgtggcctgcatcgctttcgttaccgcttcttcatcctctttgcgccagcgggtaaacagcggttgatgcggataacgtccacgcgccaccagctcctgcacggtgatatcgcccggcgtggtagcattttgcgccaacagaccaatccggcgtgcaacttctttactggcgtaatgttgaatgtgctcgccatccagccagacatgcccgtgagcaggcgtcatcaggcggcttaaggtacgcagtaacgtggatttaccacagccatttggtccgataattgccgtgaagtgaccatcaggaatttctacagtcagattttccgcaacggtatatttgccatatcccagggttaactgttcgccgcgcaaacgggctactgattcggtcattttttgcgagactcctgaattaacaagacgataaggtaaataccgccgaggctgacggtaacgacgccaaccggaagttgatacggcataaacagttgttgggcgcagagatcggccgccagcagtaacagcgctccgcacagcgccgcctgggtcagcccccagcgagcggtgccgctaatgcgtcgggcaatgtgcggcgcgactaaagcaataaaggaaatcggcccggcaagcgccgttgccgcagcggtaagcaccactgcaaccagcatcattaacagacgcgaacgctcgacgctgacgcccagcgcgcaggcggtatcatcgcccatctccagcaagcgcattcgccgcaccagcaaggcggcggcaatgagcatcaatatgatgatgggtgcggaaggcgaagtttttgcccacgtcaggccattgagcgatccggcattccacaaacccgctgttagcgccgtttctaaagacgctttcagcaacagccaagtattaaaggccaccagcatggcgcgaacgccgatgccgataataatcaaccgaaaggtgtcgataccgttacgccaggcgagcagccagaccaacagagaagtgacaatgccgcccaccattgctgccagcgcgatagccgtcaggtcctgaccaaacagcaccatcgccaccagcacgccgctccacgccccggtgttaaagcccattacgtcagggctgccgagcgggttacgcatcagcgactgaaaaatcgcgccgctgacgcccagcgccgcgccaatcaacagcgccatcagcacgcgtggtaaacgccattcggtgaccaccatcgtcatactgcgcggcgcatcgcccatcaacgcggcgaatacctgcgagatttccagcgtgacggcaccgctgcgtaatccccagatacctgcaaccacacaggcggaaatcagcagcaaacaggtgatgagtaatcggcgagagacgtaaatcatgcaccacctcgcgttttacgtcgcacgaggaagatcagcaccggtgcaccaataaacgcactgaccacagaaacgcgcagttcgccgggcacaatcacccgcccgatgatatcggcaaacagcagcagggcaggggtagcaagtagcgtgacgggcagcgaccagcgatgatcggcacctaccagccagcgcgccatgtgcggcatcatcaggccgataaaggcaatcgggccaactaccgccgtcgcactaccacaaagcacggtaatcgccagcagaccaatcaactgtgtgcgcgccacgcgactgcccagcgccgtcgcggtgtcactgccgaggctcaaactgttcagcgcgcgactcagtaatagcgcagttgctccggcgatcagaaccgggatcagcaccacttttaaggtatgtagattgcgaatatccagcgaaccggcttgccagaaacgcagttgatcgtagacgtcaggattaagcagggcgatgccgctggtcagcccttccagcaccgccgccagcgccacgcccgccagggttaaacgcaccggacttaactgcccgccgccctgactgccgataaaggcaacaatcaatgaggccaccagcgccccggcgaaggccatcgccagttgttcctgcgcggatgagtaaccaaacagcgccgcacccagcacaatggcaaagctggctccggcgttcacgccaagcaagccggggtcggcaagtggatttcgggtgagggtttgcattaacgccccagcaagcccaagcgcaccgcctgcaagtaaaccggcaagggtgcgcggcagtcgcgcgtcgagcacgatggtgcagtcggcgctctggcaggtgcctgagaaggcctccagcactactgacgcggggagtgattttgccccaatgagcaggcttaatgccgtcgcgataatcagtaataacagcaatccgggcacggcaatggcgcgtgtcacggcaacagaaccagacatacgaacttccatgataatgaaattaattatcgttatcgatcttatttggatatgttagcatgtgcagcctaagaataggtatttaaaatatttgatggcaaggcattgtaatgaataaacaatcctggctgcttaacctcagcctgttgaaaacgcacccggcgtttcgcgcagtattcctcgctcgttttatctcaattgtgtctctgggtttgctcggcgtcgcggtgccggtgcagatccagatgatgacgcattctacctggcaggtggggctttcggtgacgctgaccggcggcgcgatgtttgttggcctgatggttggcggtgtgctggcggatcgctatgagcgcaaaaaagtgattttgctggcgcgcggcacctgtggcattggcttcattggactgtgcctgaacgcgctgctgccggagccgtcattgctggcaatctatttacttggtttatgggatggttttttcgcatcacttggtgttacggcgctactggcggcaacacctgcactggtagggcgtgaaaacttaatgcaggccggggcgatcaccatgttgaccgtgcgtctggggtcggtgatttcgcccatgattggcggtttattgctggcgaccggcggcgtagcctggaactacgggctggcggcggcgggcacgtttattaccttgctaccgttgttaagccttccggcgttgccaccgccaccgcagccgcgcgagcatccgttgaaatcattactggcaggatttcgttttctgctcgccagcccgctggtaggagggattgcgttgctgggtggtttattgacgatggcgagcgcggtgcgggtactgtatccggcgctggctgacaactggcagatgtcggcggcacagattggttttctctatgcggcgatcccgctcggtgcggctattggtgcgttaaccagcgggaagctggcacatagtgcgcgaccagggttattgatgctgctctccacgctgggatcgttcctcgccattggtctgtttggcctgatgccgatgtggattttaggcgtggtttgtctggcgctgttcggctggctgagcgcggttagttcgttgctgcaatatacaatgctgcaaacgcaaaccccggaagcgatgttagggcggattaacggtttgtggacggcgcagaacgtgacgggcgatgccataggcgcggcgctgttgggtggtttgggcgcgatgatgacaccggttgcttccgcaagcgcgagcggttttggtttgttgattatcggcgtgttgttattgctggtgctggtggagttgcgacgttttcgccagacgccgccgcaggtgacagcgtctgacagttagctaaaggtgcattttcccctcaccctaaccctctccccaaaggggcgaggggattattagtgctctaattgtatgttttatcaatctttttttaacagtgaattaagtctgtccagcacttgcatggcgctgtagtaatccaggcggaacgtctcggttcccagcgtataaacctgcttgttttgtactgcaggcaggtgcgcgagcagtggattggcataaatcgcatcggcgtctttctgatcaccggcgaacaggaatagcgattcaccgtttaacccagcagccagattttccccaccaagctgaatgatgtcatggcgtttgccctggctttggctggcgtttaaccctgcgggcaacttcgccagcgtaaagccgagttgttccagcatctgcccttgtgctgattccggcgtccagagattggcactgtgtgcagcggcggtatagacaatggcagtgaccggctgcggcggtaatttgatttgctctttcgccgctgccagttgcttatcaaactgtgcaatccgctctgccgcttgtttctcatgcccggtaatttcgccaagctgcgttaacagcgactgccagcttttgtcgtcgtaattgatgattaatgtcggggcgatggtggaaagctgatcatacagcgccagcgccgaatccccgccggttgcgctaattaaaatcagatccggcatttgcgcggcaacggcttcggcgctcggttcgccgatatagagccgttgcagtttgcgttctttcgccaccttgctccactggcgtaaaaagccctggtcatctgcgacgcggttattcggcgtggtcgcgccgctggcgatcaccggagcatcaatcgccagcagtgatccggtcagggtgacgctggtggaaacaatacgctgcggctggctttccagggtatgagtgccccggctgtcagtaatctgacgcggccagtcggcggcctgaactacggctattcctgaaagcaaaagtcctgttaatagaagggcgttgcggtagagcggggcgagtctcacaagtcagcttcctgttattaataaggttaagggcgtaatgacaaattcgacaaagcgcacaatccgtcccctcgcccctttggggagagggttagggtgaggggaacagccagcactggtgcgaacattaaccctcaccccagccctcaccctggaagggagagggggcaaaacggcgcaggacatcacattgcgcttatgcgaattcatcaataatgcttctcattttcattgtaaccacaaccagatgcaaccccgagttgcagattgcgttacctcaagagttgacatagtgcgcgtttgcttttaggttagcgaccgaaaatataaatgataatcattattaaagcctttatcattttgtggaggatgatatggatacgtcactggctgaggaagtacagcagaccatggcaacacttgcgcccaatcgctttttctttatgtcgccgtaccgcagttttacgacgtcaggatgtttcgcccgcttcgatgaaccggctgtgaacggggattcgcccgacagtcccttccagcaaaaactcgccgcgctgtttgccgatgccaaagcgcagggcatcaaaaatccggtgatggtcggggcgattcccttcgatccacgtcagccttcgtcgctgtatattcccgaatcctggcagtcgttctcccgtcaggaaaaacagacctcagcccactgttttacccgcagccagtcgctgaacgtggtggaacgccaggcaattcctgaacaaaccacgtttgaacagatggttgcccgcgccgccgcacttaccgccacgccgcaggtcgacaaagtggtgttgtcacgattgattgatatcaccactgacgccgccattgatagtggcgtattgctggaacggttgattgcgcaaaacccggttagttacaacttccatgtcccgctggctgatggtggcgtcctgctgggggccagcccggaactgctgctacgtaaagacggcgagcgttttagctccattccgttagccggttccgcgcgtcgtcagccggatgaagtgctcgatcgcgaagcgggtaatcgtctgctggcgtcagaaaaagatcgccatgaacatgaactggtgactcaggcgatgaaagaggtactgcgcgaacgcagtagtgagttacacgttccctcctctccacaattgattaccacgccgacgctgtggcatctcgcaactccctttgaaggtaaagcgaattcgcaagaaaacgcactgactctggcctgtctgctgcatccgacccccgcgctgagcggtttcccgcatcaggccgcgacccaggttattgctgaactggagccgtttgaccgcgaactgtttggcggcattgtgggttggtgtgacagcgaaggtaacggcgaatgggtggtgaccatccgctgcgcgaagctgcgggaaaatcaggtgcgtctgtttgccggagcggggattgtgcctgcgtcgtcaccgttgggtgagtggcgcgaaacaggcgtcaaactttctaccatgttgaacgtttttggattgcattaaggagcgaggatgagcattccattcacccgctggccggaagagtttgcccgtcgctatcgggaaaaaggctactggcaggatttgccgctgaccgacattctgactcgccacgctgcgagtgacagcatcgcggttatcgacggcgagcgacagttgagttaccgggagctgaatcaggcggcggataacctcgcgtgtagtttacgccgtcagggcattaaacccggtgaaaccgcgctggtacaactgggtaacgtcgctgaactttacattacctttttcgcactgctgaaactgggcgttgcgccggtgctggcgttgttcagccatcagcgtagtgaactgaacgcctatgccagccagattgaaccggcgttactgattgccgatcgccaacatgcgctgtttagcggggatgatttcctcaatactttcgtcacagaacattcctccattcgcgtggtgcaactgctcaacgacagcggtgagcataacttgcaggatgcgattaaccatccggcagacggttttactgctacgccatcacctgctgatgaagtggcctatttccagctttccggcggcaccaccggtacaccgaagctgatcccgcgcactcataacgactactactacagcgtgcgtcgtagcgtcgagatttgtcagttcacacaacagacacgctacctgtgcgcgatcccggcggctcataactacgctatgagttcgccaggatcgctgggcgtctttcttgccggaggaacggttgttctggcggccgatcccagcgccacgctttgcttcccgttgattgcaaaacatcaggttaacgttaccgcgctggtgccgccggcagtcagcctgtggttgcaggcgctggctgaaggcgaaagccgggcgcagcttgcctcgctgaaactgttacaggtcggcggcgcacgtctttctgccacccttgcggcgcgtatttccgctgagattggctgccagttgcagcaggtgtttggcatggcggaagggctggtgaactacacccgacttgatgatagcgcggagaaaattatccatacccagggttacccaatgtgtccggacgatgaagtatgggttgctgatgctgaaggaaatccactgccgcaaggggaagttggacgcctgatgacgcgcgggccgtacaccttccgcggttattacaaaagtccgcagcacaatgccagtgcctttgatgccaacggtttttactgttccggcgatctgatctctattgatccagagggttacatcaccgtgcaggggcgcgagaaagatcagatcaaccgtggcggcgagaagatcgctgccgaagagatcgaaaacctgctgctgcgccatccggcggtgatctatgccgcactggtgagcatggaagatgagctgatgggcgaaaaaagctgtgcttatctggtggtaaaagagccgctgcgcgcggtgcaggtgcgtcgtttcctgcgtgaacagggtattgccgaatttaaattaccggatcgcgtggagtgtgtggattcacttccgctgacggcggtcgggaaagtcgataaaaaacaattacgtcagtggctggcgtcacgcgcatcagcctgaaggagagaacacgatggctattccaaaattacaggcttacgcactgccggagtctcacgatattccgcagaataaagttgactgggcctttgaaccgcaacgtgccgcgttgttaatccatgatatgcaggactattttgtcagcttctggggcgagaactgcccgatgatggagcaggtgatcgcgaatattgctgcgctgcgcgactactgcaaacagcacaatatcccggtttattacaccgcccagccgaaagagcagagcgatgaagatcgggcgctgttgaatgatatgtgggggccgggcctgacccgttcgccggaacagcaaaaggtggtggatcgcctgacgccagatgccgacgacacggtgctggtgaagtggcgctacagcgcgtttcatcgttctccgctggagcaaatgctcaaagagagtggacgtaaccagctgattattaccggggtatatgcccacattggctgtatgaccaccgcaaccgacgcatttatgcgcgatattaaaccgtttatggtggcggatgcgctggccgatttcagccgtgacgagcatttgatgtcgctgaaatatgtggccgggcggtctggccgggtggtgatgactgaaggattactgccagcacctgtccccgccaggaaagcggcgctgcgtgaggttatcctgccgttgctggacgagtccgatgaaccgttcgatgacgacaacctgatcgactacggtctggattcggtgcgcatgatggcgctggcggcgcgctggcgcaaagtgcatggcgatatcgactttgtcatgctggcgaaaaacccgaccatcgacgcctggtggaagctactctcccgcgaggtgaaataatggatttcagcggtaaaaatgtctgggtaaccggcgcaggtaaaggtatcggctacgccacggcgctggcgtttgttgaagcgggagcgaaagttaccggttttgatcaagcgttcgctcaggagcaatatccctttgcgaccgaagtgatggatgttgccgatgctgcgcaggtcgcgcaggtatgtcagcgactgttagctgaaacggagcgactggacgtgctggtcaatgcggcgggaattttgcgcatgggcgcgaccgatcagctcagtaaagaggactggcagcagacttttgcggttaacgtcggcggtgcgtttaacctgtttcagcaaaccatgaaccagtttcgccgtcagcggggcggggcgattgtcactgtggcgtccgacgccgcacacacgccgcgtattggtatgagtgcttatggcgcatcgaaagcggcgctgaaaagcctggcgttgagcgtcgggctggaactggcggttagcggcgtgcgctgtaatgtggtttcgcctggctccaccgacaccgatatgcaacgcacgctgtgggtgagcgatgacgccgaagaacagcgtattcgcggctttggcgagcagtttaaactcggcattccgctggggaaaatcgcccgtccacaagagatcgccaacacgattttgttcctcgcctctgacctcgccagccatatcaccctacaggatattgtggtcgatggcggctcaacgctgggggcataagcatgatctggaaacgccatttaacgctcgacgaactgaacgccaccagcgataacacaatggtggcgcatctgggaattgtgtatacccgtctgggagatgatgtgctggaagccgaaatgccggttgatacccgtactcatcagccgtttggcctgctgcatggcggcgcgtcggcggcgctggctgaaacgctgggatcgatggccggatttatgatgacccgtgacgggcagtgtgtggtgggtacggaacttaacgccacccatcatcgcccggtgtctgaaggcaaggtacgcggcgtctgccagccgctgcatcttgggcggcaaaatcagagctgggaaatcatcgttttcgatgaacaggggcggcgttgctgcacttgtcggctgggtacggcagttttgggatgagcccgacagaattaaatgagattgcaggaaaactcggttaacggagtgatcgagttaacattgttaagttaaatattggtttcaactccgatttacatggttaccgtgttgttaaatcgtacaaagatgttatagaaacaaaatgtaacatctctatggacacgcacacggataacaactatgaacaaatcagggaaatacctcgtctggacagtgctctctgtaatgggagcatttgctctgggatacattgctttaaatcgtggggaacagatcaacgcgctgtggattgtggtggcgtcggtctgtatctatctgatcgcttaccgtttttatgggctgtatatcgccaaaaatgtgctggcggttgacccgacgcgtatgacgccagcggtgcgccataacgacgggctggactatgtgccgacggacaagaaagtgctgttcggtcaccattttgcggccattgccggagcagggccgctggtggggccggtgctggcagcgcaaatgggctacctgccggggatgatctggctgctcgccggggtggttctcgccggtgcggtgcaggatttcatggtgctgtttgtttctacgcgccgtgacggtcgctcgctgggtgagctggtcaaagaagagatggggccaactgccggggtgattgcgctggtagcctgctttatgatcatggtcattatccttgcagtactggcgatgatcgtggtgaaagccctgactcatagcccgtggggaacgtataccgttgcgttcaccattccgctggcgatttttatgggaatctacctgcgctatctgcgtccggggcgtattggcgaagtgtcagtgattggcctggtgttccttatttttgccattatctctggcggctgggtggcagaaagcccgacctgggcaccgtactttgactttaccggcgtgcagctgacctggatgctggtgggctacggttttgtggcggcggtgctgccggtgtggttactgctggccccgcgtgactacctctctaccttcctgaaaatcgggactatcgttggtctggcggtaggcattttgattatgcgtccgacgctgaccatgcctgcgctgaccaaatttgtcgatggcactggcccggtatggaccggtaatctgttcccgttcctgtttatcaccatcgcctgtggcgcggtgtcaggcttccatgcgctgatctcttccggcaccacgccgaagatgctggcgaacgaagggcaggcgtgctttatcggctacggtggaatgttaatggaatccttcgtggcgattatggcactggtttccgcctgtatcatcgatccgggcgtgtacttcgccatgaacagcccgatggcggtgctggctccggcagggacggcggatgtggtcgcttctgccgcgcaggtggtgagtagctggggctttgcgattactccggatacgctcaaccagattgccagcgaagtgggtgaacagtcgatcatttcccgtgcgggcggtgcgccgacgctggcggtggggatggcttacatcctgcacggtgcgctgggtggtatgatggatgtggcgttctggtatcacttcgccattctgtttgaagctctgtttattctgacggcggtagatgcgggtacgcgtgctgcgcgctttatgttgcaggatctgctgggcgtggtgtctcctggcctgaagcggaccgattcactgcctgctaacctgctggcaacagcgctgtgcgtactggcgtggggctacttcctccatcagggcgtggtcgatccgctgggcggcattaacactctgtggccgctgtttggtattgccaaccagatgctggcagggatggcgctgatgctctgtgccgtggtgttgttcaagatgaaacgtcaacgttacgcctgggtggcgctggtaccaacggcctggctgctgatttgtaccctgaccgcaggctggcagaaagcgtttagcccggatgcgaaagtcggcttcctggccattgctaataagttccaggcaatgatcgacagcggcaatattccgtcgcagtatactgagtcacagctggcgcaactggtgttcaacaaccgtctggatgccgggttaaccatcttctttatggtggtcgtggtggttctggcgctgttctcgattaagtcggcactggcggcattgaaagatccgaagccaacggcgaaagaaacgccgtatgagccaatgccggaaaatgtcgaggagatcgtggcgcaggcaaaaggcgcacactaaagtcagagtgaggggggatgttggcgaatgttggcatagtgccgagggttcctcctcaccctaaccctctccccgatggggcgaggggactgaccgagcgcgttgatagcatttgtaggccggataaggcgttcacgccgcatccggcactctttcagcaacatggttagcggaggccaagatgtttgattcactggcaaaagccggaaaatatttaggtcaggcggcgaagctgatgattggtatgcctgattacgacaactatgtcgaacatatgcgggttaaccatcccgatcaaacgccgatgacctacgaagagtttttccgtgagcggcaggacgcgcgctacggtggaaaaggcggcgcgcgctgctgctaaatttgcacgtcaggctttaaacgattccactttttcgaacgctgcacgcaacgtatctggtgtcagcgtgactggcaggtaatgaatgtattccaccggacgcagggtgtgggtaatcactttgtcgatctccgcatgattattgatatccatttccagctccgccagcgtggtcggcagatgaaaacgctgatacgccccggttaattgcgccagcacatcatcctgacctagcaaggcgctttgtaccagaatgccataagcgactttggtgccgtggagaaatttctcggtttgcggcaggacagtcagaccgttatgcacggcatgagccgccgccacacgcgtaaaacgatcgcccagaccaccgaccatcccaccaccagcaataatagcatccaccacatcgcaaaatgattgcgttaactgttgattttgctgatcgctcagcgcctgttcgctactgtttaacaatacgtcgcgaatggcctgcgcattattgatccccagtcgcacggttagcggcaacgtttctggttgcggagccagcaccaccgcttcataccatttcgccagcgtgtcaccgatccccgccagcagatattgttgcggcgcgttgaggataatctctggttccaccagcaccataaaattggcgtcgtcgaaaatctcataatgcagcgcctgtccggcatcgttataccagacggagagcggtgtccaggcggcgcaggtagcggcgatcgtcggaacggcaacaaatggcagaccgagacggcgggcgagggctttcgcggtgtcgagcagtgcgccgccgccgacgccaatcaccacgctgcgatcgtcaccggactcagccgccagttgctgtacatcgctttcgctgcaatgaccacgaaacaaaatatgctttgcccctggaagtccaaacgctggcggaagtttggtttgcgccgcagcaatggcgcgtttgccgtagatccacaccgcgcgagaaagttgttcatcagtgaaaaaatcgttcaggtgattgaaacttcctggatgtgaaaagtagttagccgggccgacgaccacgcggataggattgtgaggcatgttgtgttgtccttattgttttatttagacatctaaacgtcttgattgccaaatactagcatcgtgttatagtgccttcaacacgcaacttcgtcaggtacaataaaaatgacaaataaccctctgattccacaaagcaaacttccacaacttggcaccactattttcacccagatgagcgcgctggcgcagcaacaccaggcgattaacctgtcgcaaggctttcctgattttgatggtccgcgctatttacaggagcggctggcgtaccacgttgcccagggggcaaaccaatacgcgcccatgaccggcgtgcaggccttgcgcgaggcgattgctcagaaaacggaacgtttgtatggctatcaaccagatgccgatagcgatatcaccgtaacggcaggggcgacggaagcgttatacgcggcgattaccgcactggtgcgcaatggcgatgaagtgatttgttttgatcccagctatgacagttacgcccccgccatcgcgctttctgggggaatagtgaagcgtatggcactgcaaccaccgcattttcgcgttgactggcaggaatttgccgcattattaagcgagcgcaccagactggtgatcctcaacactccgcataactccagtgcaactgtctggcagcaggctgatttcgccgctttgtggcaggcgatcgccgggcacgagatttttgtcattagcgatgaagtctacgagcacatcaacttttcacaacagggccatgccagtgtgctggcgcattcgcagctgcgtgagcgggcagtggcggtttcttcatttggcaagacctatcatatgaccggctggaaagtgggttattgtgttgcgccagcgcccatcagcgccgaaattcgcaaggtacatcagtatctgaccttttcggtgaataccccggcacagctggcgcttgctgatatgctacgtgcagaacctgagcattatcttgcgttaccggacttttatcgccagaagcgcgatattctggtaaatgccttaaatgaaagccggctggagattttaccgtgtgaaggtacatactttttgctggtggattacagcgcggtttctaccctggatgatgttgagttttgccagtggctgacgcaggagcacggcgtagcggcgattccgctgtcggtgttttgcgccgatcccttcccacataaactgattcgtctctgttttgccaagaaggaatcgacgttgctggcagcagctgaacgcctgcgccagctttagttatttaaccgtccaggcgcgggaatattgacggtcggcaaacagctcttgcaggccgttaatttgcttcaggcgcagcacttcgtcgctgtccattcccagctctttgccaattttattatcgtcccatcccaactggctaagttcacggacgatttccgacatggcggtgatttgatggcgtccacgagcgcgattatgacgaatagtcgcggcgatgcgttgattacgcgtaccttccagacagatcaccggcaaataaccttttaagcgtaattttaatgatgatgagcctttaccaatttcatggcggtgaaaaccatccacgatttccatggcatttttatccgtatgtgtgaccacaatgggttgggtaaaaccatctatttcaatggatttttgcagcagttttttttcgggtggtgccacgttgtttgggttgtaatcattaggcataagttggctgtttttaacccacagaacgcaatccactggctcttcacgaaaggggctaacctgatggatcgccatgcggatttcattaatcgctttgatgcgatcatcttccggcaagctggcgagaaattgcgttaaatcctgcgttaatcgttgttgcatagtatcccccattcctgacgttttccttttatccgttcgttataacgctgatagttcttcgctttcgtaggactaaatgataatgcccgacaccagtaatcgttattgagtaaaactttgcatatccgccgccaggaggggatatctttcgcgccaatgtccccttgctgggtttgtggaacctcgatgccttttttctgataccagtgcaaataaatggcgattttattgcggtaatgctcagctgttttttccggcatgctattgagcagcaataatgcatattcttgccagtctaaatgttctggcttgaggattttccgatgcccatagaaatgattatcatgtccggcgtaaatgccgccactttttaccccgctgactcgtgcgcacatagcagcccagcgatccggttcgataacgtgatagagccataatccttgtcgttgctccgggccaaaaggttcgcaaattcgcatatgacgcagaggaacgcctgcctgatacattaggttatacagtgggttgcagagattttgatgatttgcataccaggtccagatatcagccactttccagtcgtaaatggggtaaatgtaccagctatgaccgcctggtgcggccgtagtccatggtttatcgtcggcaaaacgttgtttatttaaactggcgatggcgacaaaacggttgtaggactcatccgcacggatgccgatcatcatcgccaccggacgtttttgtgaaaaccattcggcaaactcacgtacaaattgttcgaaggtcatgcctggctggtaaaagcagaaaaagtcaggatcggttatcgcatcttgcgggggctgacgcacccattcgacatcaggttcccagcactgccattcgggttggtattgtgaaagggaattttgcgtcgtaagcgggagcgcaacccagtaaaactcttcgatgacatcggtgtacaactcgcgcagggactgaacatagttaatggtgcaagagaattgcgcctcccagtcgataaacaaaacgcagatttttttgcccatttgtcgggcaagttcggctgtcagatgcagcattaaaccagagtttttgccgccagaaaatgagacacaaacgcggggtagggtgttgagtgtccaggtaatacgctctcgtgcagcttccagaatattgagcggaagaggaattttataaatagacatctgaagacgctctctgaacgttacagggtgaacagtgagataagactgttaattataaagtaaacactgtaaagcagagtgttttatttttcattcgcgctgtgaataaatagatgaaagttatagtagctgtctgtagttatatatcaaaaactctcatttagacggtcaataaatcgggagaacaccaaattatttaaagaagatttattataggaaatgtaaagctttattgaaggtaacggatgttctagttttatctcttttaaattaagaaagtcacggtgggagttataaagttcataggggactattcccagtaaatctgtaactgcaatgctattaattattgtcagcaaagaggaaccacgaaatgaaattttgcgattcataaacttctcgtctatttccatttgaatatcatcaactcctgctgatttggatattaattgggtgaactcttctgccataatttgttcataagtgctattgtcagtaattcgcggatgcttattactacaaattagagtattgcgaattgtatgcaatggcatgcaaatgacggaacggctgatcactggcatttgggtgatcaccagatcggctttgcggtgaaccaacagttcttcagcattctctgctgacatgaggatatcatggcactcaatctcgacagaggcatcttgccgtaggcagcggatcagcatactattattagagcaagaaatgagctgagggccgtagataataaagtttttctttagttcggacttattgactatattaattgtttgttcaaggcctttgaggtttttctcaagatggtgatgcagattcaaccctgttgtcgtcggcgcgataccttttcctgagcgaatgaatacagggtcattaaattgcgcacgtaagcgttgtaacgactggctcacggctgatggggtgatatatagtgattcagcagctttgctaatgcttaaatgctggtaaatacactcaaatatgacaagaagatttaagtcgaattttttcaagtcgtagagattggccatacactactccggtttatatttttcttccatggtatattcacttaatcaatgttttttgcgtatgtatttttattgattatgtttttttgcttaactcaggattaagtttttctaaaatagcacagccacttagggtagagcgagcaattcatgcttttttaggatggttgaaaagcagggatatagttcaaccatccatgaattaccttttatttatttcccataatgggtgatgttgccaacttactgatttagtgtatgatggtgtttttgaggtgctccagtggcttctgtttctatcagctgtccctcctgttcagctactgacggggtggtgcgtaacggcaaaagcactgccggacatcagcgctatctctgctctcactgccgtaaaacatggcaactgcagttcacttacaccgcttctcaacccggtacgcaccagaaaatcattgatatggccatgaatggcgttggatgccgggcaactgcacgcattatgggcgttggcctcaacacgattttacgtcacttaaaaaactcaggccgcagtcggtaacctcgcgcatacagccgggcagtgacgtcatcgtctgcgcggaaatggacgaacagtggggctatgtcggggctaaatcgcgccagcgctggctgttttacgcgtatgacagtctccggaagacggttgttgcgcacgtattcggtgaacgcactatggcgacgctggggcgtcttatgagcctgctgtcaccctttgacgtggtgatatggatgacggatggctggccgctgtatgaatcccgcctgaagggaaagctgcacgtaatcagcaagcgatatacgcagcgaattgagcggcataacctgaatctgaggcagcacctggcacggctgggacggaagtcgctgtcgttctcaaaatcggtggagctgcatgacaaagtcatcgggcattatctgaacataaaacactatcaataagttggagtcattacccccataatgatattaagcgttttctgatcgggcaaccccacggcctgttgcagcgtattttccttactcatgtaatagatagccggcgtgacatttgcccccagatcgtccatcagtttctcattgtcacttaacactttcatttgctctgtacttacgtttgcaggcacgtttagcttaagcttgccaccagaggcttcatattgttgccaggtttttgcgggatctttggaggcaagaattgccgctgctgtcgccgggctttctggcttgataaccccaaccaacaatgttcttaattgcactttgccagaatctacccacgggcgcgcctgctgccagaactgtttacaatatgggcagaacggatcggcgaagacgtagacaatgaccggcgcatcttttttaccgtcgaggatccagtgggattgttccatccgttgccacatttcgcgtccggctggtgcgtaaatttctttttcgataagtgtgttactcaggttttcacctttctcgttgtacatgtaaccagagatagcgtgcttaccatcgggagtcaggtaggtagatggtgacgcccatatcctgatactttccgagataacctttcattcctccgggggcatcgaacgttttgatgattgtaatgccctgtttttcaatcgcttttactggggaaggaagttcctctgcgaaggcgattgcaggaagcagagccagtaaaagtatcttttttaacattaatttgtccttttcagtcagtgcaaaagtcgagtaaaaggcataacctatcactgtcataggtaagagcttagatcaggtgattgccctttgtttatgagggtgttgtaatccatgtcgttgttgcatttgtaagggcaacacctcagcctgcaggcaggcgctgaagataccaaagggtagttcagattacacggtcacctggaaagggggccattttactttttatcgccgctggcggtgcaaagttcacaaagttgtcttacgaaggttgtaaggtaaaacttatcgatttgataatggaaacgcattagccgaatcggcaaaaattggttaccttacatctcatcgaaaacacggaggaagtatagatgtccttgattaacaccaaaattaaaccttttaaaaaccaggcattcaaaaacggcgaattcatcgaaatcaccgaaaaagataccgaaggccgctggagcgtcttcttcttctacccggctgactttactttcgtatgcccgaccgaactgggtgacgttgctgaccactacgaagaactgcagaaactgggcgtagacgtatacgcagtatctaccgatactcacttcacccacaaagcatggcacagcagctctgaaaccatcgctaaaatcaaatatgcgatgatcggcgacccgactggcgccctgacccgtaacttcgacaacatgcgtgaagatgaaggtctggctgaccgtgcgaccttcgttgttgacccgcagggtatcatccaggcaatcgaagttaccgctgaaggcattggccgtgacgcgtctgatctgctgcgtaaaatcaaagcagctcagtacgtagcttctcacccaggtgaagtttgcccggctaaatggaaagaaggtgaagcaactctggctccgtctctggacctggttggtaaaatctaaatttccttcgtctttcgcgctaccaactccggcgcgaaatacttcggaaattcacctaattcttcgggtgctgcggcacccgattttcttccccgcaccatgatgcaagctgcatccaggtagccgtagaggccgcttgcatgatgatgtttaaagcccaggagataaacatgctcgacacaaatatgaaaactcaactcaaggcttaccttgagaaattgaccaagcctgttgagttaattgccacgctggatgacagcgctaaatcggcagaaatcaaggaactgttggctgaaatcgcagaactgtcagacaaagtcacctttaaagaagataacagcttgccggtgcgtaagccgtctttcctgatcaccaacccaggttccaaccaggggccacgttttgcaggctccccgctgggccacgagttcacctcgctggtactggcgttgctgtggaccggtggtcatccgtcgaaagaagcgcagtctctgctggagcagattcgccatattgacggtgattttgaattcgaaacctattactcgctctcttgccataactgcccggacgtggtgcaggcgctgaacctgatgagcgtactgaacccgcgcatcaagcacactgcaattgacggcggcaccttccagaacgaaatcaccgatcgcaacgtgatgggcgttccggcagtgttcgtaaacgggaaagagtttggtcagggccgcatgacgttgactgaaatcgttgccaaaattgatacgggcgcggaaaaacgtgcggcagaagagctgaacaagcgtgatgcttatgacgtattaatcgtcggttccggcccggcgggtgcagcggcagcaatttactccgcacgtaaaggcatccgtaccggtctgatgggcgaacgttttggtggtcagatcctcgataccgttgatatcgaaaactacatttctgtaccgaagactgaagggcagaagctggcaggcgcactgaaagttcacgttgatgaatacgacgttgatgtgatcgacagccagagcgccagcaaactgatcccagcagcagttgaaggtggtctgcatcagattgaaacagcttctggcgcggtactgaaagcacgcagcattatcgtggcgaccggtgcaaaatggcgcaacatgaacgttccgggcgaagatcagtatcgcaccaaaggcgtgacctactgcccgcactgcgacggcccgctgtttaaaggtaaacgcgtagcggttatcggcggcggtaactccggcgtggaagcggcaattgacctggcgggtatcgttgagcacgtaacgctgctggaatttgcgccagaaatgaaagccgaccaggttctgcaggacaaactgcgcagcctgaaaaacgtcgacattattctgaatgcgcaaaccacggaagtgaaaggcgacggcagcaaagtcgttggtctggaatatcgagatcgtgtcagcggcgatattcacaacatcgaactggccggtattttcgtgcagattggtctgctgccgaacaccaactggctcgaaggcgcagtcgaacgtaaccgcatgggtgagattatcattgatgcgaaatgcgaaaccaacgtcaaaggcgtattcgcagcgggtgactgtacgacggttccgtacaagcagatcatcatcgccactggcgaaggtgccaaagcctctttgagtgcttttgactacctgattcgcaccaaaactgcataagaagaagtaagattcacctgcaattgcttagccgccggggtcaaacctggcggcttttttatggcattaaaaagccctgccgggatgttccaggcagggcggcataaatacttttatctgttagcgaatgaccagtacaggcagattggcgtggcggatcacgctcgaggcgttagaacctaacagatgggtcgaaatcgatgggttgcgagaaccgataactacaacatcagcccccagttcttctgccaactcattgacttcatcccgcacgctaccaaaacggacatgttgtttaatgcgggaaggatcgatggtgaagtggctgaccatcgtttgcagacgttcttctgcttcatgttgcagatgctcttcaaaacgacgcacatcagcggcaaaacggtgcaggctcaggctggctgacccgggtagtacgtgaagtagatgaataactccgtcatcctgggcgaggaattcagcgtggcgaacagctttgtcgctcaattccatttcaaatacatcaactggcataatgattgtcttatacataaccctttctccctgttaatcatgaacaaatcattcgccatgattataatatttatccctgatatttgtctggttctttttccttacgaacggtttctgtgattaatatattctcactgaacaccaggaattctcccaaaacctgcggtaccgcccgttttcccgctgtgatagctacccttaaagactgactcttttttgaactgtctctggaggttgcatgaaagcattgacttatcacggcccacatcacgttcaggtagaaaatgttcccgatccgggcattgaacaggctgatgatattattctgcgtattacggcaacggcgatctgtggctctgacctccatctttatcgaggcaaaataccccaggttaaacatggcgatattttgggtcatgaatttatgggggaagtcgttgaaaccggaaaggacgtaaaaaatttgcaaaaaggcgaccgggtggtaattccgtttgtcattgcttgtggcgactgttttttctgtcgaatgcagcaatatgccgcctgcgaaaataccaatgcgggtaaaggcgctgcgctcaataaaaaacagataccagctcccgcggcattgtttggttatagtcacctgtatggtggcgttcctggtggacaggcggaatatgtccgcgtccctaaagggaatgtggggccgtttaaagtaccgcctttgctttcagatgataaagcccttttcctttctgatattctgccaacggcatggcaggcagcaaaaaatgcgcagatccaacaaggttcaagcgttgcagtctatggtgccggtccagtgggattgttgacaatcgcctgtgcacggttgctcggtgcggaacagatttttgttgttgatcatcatccctaccgcttgcgtttcgccgctgaccgctacggcgcgatcccgattaatttcgatgaagatagcgatccggcacagtcaattattgaacaaacggcaggtcaccggggcgtggatgcagtaatagacgccgtcggttttgaagcgaaaggcagcaccacggaaacggtgctgactaacctgaaactggagggcagcagcggtaaagcgttgcgccagtgtattgcggcggtcaggcgtggcggcattgttagcgtaccgggcgtctacgctggatttattcacggtttcctgtttggcgacgcctttgataaagggttgacgtttaaaatgggacagacccacgttcacgcatggctgggtgaattattaccgttaattgagaaaggattactgaaaccagaagaaattgttacccactatatgccgtttgaagaggccgcccggggatatgagattttcgaaaaacgtgaagaggagtgccgtaaggtgattctggtacccggtgcacaaagcgcagaggcggcgcagaaggcggtttcaggtctggtgaatgcgatgccggggggaacaatatgatcgtcaggagtggttttcgaggtaaaggacagccatgacgataatcgccgccataatcagaaatcctatcaggatgtaaaatgcttctgccatggttattcccacaaacgaaacggaataattttgcagcaaaagtgaacagtgagaaccaggaaaaattgctgattttgcgtaaagaggatgcgagtgcatcctctgggcaaagcgagttatcgcttgtgcagatgggattaaagcaggtagtcgccagcagcttctggctggtattcgagttccagcacttcaaggtgggttgcaacgccgcccggaagttcccagtgaatggaatcgccaacgcgcagccccagcagtgcggcacctaccggagccataacggaaagctgagtattgctatcggtcatttttgccggatacaccagcgtgcgcacacgcacttcgccatcgctaagattgcggaatttaacccggctgttcattgtcaccacgtcgtgtggcatctcttctggcgaacacatttgggcgcgatccaactctgcgtttaacgcgtcggcgattggcaaaccagcataggcgggttgctccagcagaatatcgatgcgttcggcatccaggtcgttaatgatgatagttggtctggacatttttactccatgtcgtcggtactgcgagtgtcgcagataaacatacccaaaagaaaaccctcaccgtcaggcggcgagggtttaactcacatgatgatactgactgttgctcactctttgaagtgatttgcgtcacattcagggaattcctcaatgcagcgcattatgtataattcttaatcgtcacggtttatggaagacgaattagcgtgttttgtaaatcagatgattaataacccactttatcaatcacaaaggttttgccacagttgcctgggtgtggttgtggcaagaatgagtttgcagaaagcggagcgttgatggcgtcagctttgatcgagatctgaatttcagtcaaatacgcagggttaccctggcacgttagcttaactgctttcacgttctcttttccccagcttttggcaaaggcggcgtcaaagtcacggcggctcactgttttaccgtaattatccgcaaggaattttccggcttcgctctctttaatttcttgattcaggcgtaccatcgtaccgaagtatgcgtccggatcaaaaccaaagcaggcaccgtgtttggcatattcgtagcgttccaggcaggaacgtccgccagctcctggcatgacttcacttagtttagcggccgtttccagtgataacccggtttccggcgatgaacacatccggctggcgtgcgcttctggtagattcgggattgggcgagtagcgcaaccgaagcgcatccagcggcgttcatcaacaccacgggcagcaaccgatttaggcaatcctggccacagaccatgtacggtcagaaaatcagctttgttggtcgtttcggtttgtaggcgacattcatctcgttcgttacgatttcgatcgtgttgactctggcaaaatccggtttgccaggagagggccaggacatagcgatcaaaatcgccatactgttttgcctgcaacgctacggcgttggcagaagagaagggaagcagagaaaccgcgagcaacgcggcgttacgccagaatgctttcataatgggtgtggaactcatacatacactgaatactatctattaaatcataaaaaagcccgccaggtgggcttacctggcgggcgtgatgatttattcagcgtttggcgaacgtattagttccacatggcgagaatcggccagccaaccaacagcaacatagagatgtaaatcaccccgaagattgcgccaagacgccagtaatcttttgatttcacatagccacagccgtaaataatcaccccaggaccggttgcatacggcgtcagacagcccatgataccgatagacagcaccagcaggatacacagttgttccattggtacgcccggaatacctttaccgacggccagaataaccgacagcatggttgcggtgtgcgcagacaggctggcaaacaggtagtgtgcaaagtagaacaccagaaccagtacaatcaccgttgcgtttggtgagaatccttccaggtgcgtactcatggtaccggcgaaccagtcaataaagccagaacgagtcaggccgttagccatcacaaccagagttgccaggttgaccagcgtgttccatgcgctgttatagcgggtaatatctttccaaggcacaacgtgcagggccagcattagcgaaactgccagcagaccaactgcagtagcattaatgacttcactgccaaaaacccacaaacctaagctgagcaatacaaggccaatcagtgtccactctctgcgtgtcagcgcacccatggttttcagttcatcacccgcccaggttgccacttcttcactgtgtgtgatttccggtttgtacagcacgtaggaaagccacggcgcaatgataagcaagataaccccaaccggcaggaagcagaggaaccactgcaaccagctaatctggataccggcaattttgctgacgaactccagacccagcacgtttggtgccgcaccggtgacaaacatggacgaactcagactggtactaatgaccatcatccacatcaaatagccgccaatacgacgcgcggacggatcgttggggaatgatttaaacagcggcggcaggtttttaatgaccggaaaaaccgtacccccggtacgcgcggtgttggacggtgtaaacggtgccagcagaatgtcgataatgacaatcgcataacccaacgtcagcgtgcgtttgcccatgaatttcaccaggaaaagggcaatgcgacgacctaacccggaaacttcataccctaatgcaaaaataaatgcgccaaataccagccataccgtggtgctggaaaaaccagccagaccccatttcagcgcctgtttttgcgcattaaacgctgggtcagctaattctttggcatcaaagagcaggtaattactgccaataacgcaaatagtaaccgcaataaaactgatcgctgttgccggaattggctcgaggatcatgccgacaatcattgccacaaacacagcgaagtaatgccatgcctgtggtggcataccgtcggggacagggataagaaacatgacacccatcaccaccagtggggccaatagtttccatatattatcttttgctaaagacatacgggttctccgaaaattaatatttccaaatttatcaagtgcttaaataattaaatctgtgctaaaaaccaggtaaggatcagcaggtcggcactgccgcctggactgagatttcgttcgatacactccctgtcgaactgccggagataatcgagatcggcgggggttcgaatgccccctttttgcaataatgtttgcgcctcgcgctgtagccagcgcaggcccccctcgccaccgcgcgatgcaacgttggtatcgccgttgatcgccatcagtaggagcaaggtatcgagcaatgccagttcaggatctaacccctgatccagcagagtgaggtaatgcggcaaggcgtgattgatcaccagtggataacccgcttcggcttcaccgcgtgcgccggtaaggccaagctgctggtacaaccgttgacctgccgtcagttgtgaattattggtacgcagttctcgatcggtcaggccacggcagaaacttgccgccgtagaacaaacggttgttggcgttaccggttggttgagttgaagcaaacggccaattgccgcacatagtagccctaaagaaaaaatgctgcctttatgcgtgtttacgcccgcagtggcgcggaacatatcaccttcgcaagccataccaattgggcgtaatccgtggagtaccgcttctggtgctatttccgcactacaggcaccaaattcaatgaaacggggtagccagccctgaatcgccagcgcgctgcggtggaaatcttccagcgccatatctttatgtgcaccgcagttaatccgatccacgaggcctggtttcggtgacagattgacttcagtcagcatggcgcgccagcccagcagggcgtactcatcgatcaatgacgtcgcaagctttgtggttttagttgacgttgcaggcatcgacatcgttcagcagtgcctccatgcggttgagtaaatcggtcagttgatgggtttttccacgcgcgcagacggctgcgctttgctcgcacaacaggcagcggcgaggcggcagtgaatagtcgcggcgggagagaatttcgccttcgggcgtcaggacatcgatatcccataaccgcccgagaggatgactatgttcaagctcaatggtggcgagcttgaggtcgcgagccggggcggcaatgctcaacatgccctccggcccgctggcggaaaccagtgcagcctgctcctgaatttgccagccctgttttgcggctaaggcacgcaaggctgtcacgccatgattaaaaattcggcgtgtgacctcgctgtctttaatcggcccaggcgcaaccacggtaaaggagaccagtggaacaggatggcgcttgagccagacgtgttgccgtgcttgcctttcatcccggctgacgagcagctcgggaattgacaccgcatggtggctggcgagttcaggaagcaggtgcatggcttattccttcacctgatgcacaacatcgatcaccgagccatcgcggtaacgcacaacggcaacgacgcggtcggtgaattcaatcggctgtggttcaccggtcagcagacgcgcgcgttcgcgcagccactcaatggaaaccactttaatgcccgcttcctgcagacgttctgccagttccggacgtgccgggttaactgcgataccgtggtctgtgaccagaatatcgacactggagcctggggtgatgcaggtcagcacgttatccaccagagtcggaatacgaccgcgtaccagcggcgcgacgatgatggaaagcgcagaggcaatcgcggtatcgcagtgaccaccggaagcaccacgcagtacgccgtcagagccggtcagcacgttaacgttgaactgggtgtcaatttccagcgcgctcagtaccaccacgtcgagacgatcaaccgatgcgcctttcgaaccccagttagcgtactggttggcgctgatttcgatgtgattggggttacgggccagcgattgcgcagcatggctgtcaaagctctgcacatccagcagtttgcggatcagacctttttcgtgcagatcaaccatcgtcgcggtaataccgccgagggcgaagtcggcgcgaatatcgcggctacgcattttgtcttccaggaaacgggttaccgccagcgatgcgccgccggtgccggtttgcatggagaaaccttctttgaagtagccagagttgacaatcacatccgcagcgctacgggcaataagcagttcgcgcgggttagtggtcatacgggtcgcgccagcgccgatttttgcagcatcgccaacgcggtcaactttgacgatcaaatcaacctgatcttgctcaatgcttgccggattatgcggataaggcagcagttcttcggtaagcatcacaacctgttttgcgttgtcggcatcaaccattgcatagccgagggagccgcagcaggctttaccggtgtaaccgttggcattaccgaattcatcacaggacgggacgccgaggaaagccacgtcgatattcagttcgccgctctgtaccagatgcacacgtccgccgtgagagtggatttgcaccggttccgcaagcagaccacgggaaatttcttctgccagtggaccgcgcaggccggaggtataaatgcgggtaaccacgccctggcgaatgtgttctaccagtggcgcatggcaatcactcagggagctggacgccagggtcaggtttttaaagcccatcttagcgatgacgtccatcaccatattgacggtcaggtcaccgccacggaaagcgtgatggaaggaaaccgtcatgccgtcctgtaaaccagagcgacgaatcgcttcttcctggttggcgcacagtttgcgatcgcgcgctttttcagcctggtaggtttgctttggtgagttctggaaagcggcaagatcgcattcagcgcgacgattccaggccgctacccgttcttgtcgttgagattgttcaattttctgcgtcattttgattgccttattcttcgcggatgccggaaagttctgcacgggagagcaccagacgggcacgatcgataaccggaccgtccaccatcttgccgttcagggaaaccacgccgaggccttcgcgagcggcggcttcagcggcttctacgacgcggcgggcgtgatccacttctttctgggtcggtgcgtagaggttgtgcaacagatcaatctgacgcgggttgatcagcgatttgccgtcaaagcccagctgtttgatgtgggcggcttcttgcaggaatccggcttcgttgttagcgtcggaatagacggtatcgaacgcctgaatacccgcagagcgcgcggcctgcaaaatggaacagcgtgcgaacagcagttcagttccttccggggagcgttctgtacgcaggttgcgcacatagtcttctgcaccgagggcgataccgatcaaacgctcggaagcgtgagcgatttccactgcgcgggtaatccccagcggagattcaatcgccgccagcaggccggtgctgccgggttcacgaccacaggctttttcgatacgcaggatctctttttcgatatccagaacatcctgagcggtatcggttttcggcagacgcacaacgtccgcaccaccgcgaacgacggcttccaggtcgttgacaccccattcggaatccagcgcgttgacacgcacaatggtttcaatatcgcgatacagcggatgttgcagcgcgtggtaaaccatgcggcgggcggtgtctttttcacgcaatgctacggagtcttcgaggtcaaacatcagggcatcagccgggtagatgaaggagttgctgaccatcgcggcattggcaccaggcacaaacaacatgctgcggcgggtgcgagttttacgttgttgcagcgaagcggaaatcattggcaatcctcccatggcagagccgggataccgctggcgcgtgccagcagggcttccagtcgtgcacgtaaaatgcagtccagtgcgcctttgtcatcgacattcagctgtacgccgcgcacgttgtagcgggcgagaacgtccagaatggtggtgcgaattgcatcgccaaactgtttctcaacgctgctattgatttgcaggtcgatatcctgcgtatcgagtggggcgatgcgtatcatcacatccccagactcaagggtgcctgcaacggcgggctggtttattttcatttttcacctgtttctcatgcgggggtcttttgacgagctgccgcgtcctggcgggagtgctcaagcaggttctgcaaataatgcagcgtgactgcagggaccagcggcgcgatagccgtgagatcgtttttcgccagcagttgacgtacccgggaagcggatatcggcatctcctggtaacgcagccgctcaatttcaaccagttcgatgggcggtgcggagatagtcggcgtttccagccagtagcgcatatcctggttgtactgggcggtaacgcgacaaaagggttcagtaccgacaaagcggtgagttacacccagcgcgggagcgaggtactgacggaaaatcttcagatcaatttcggtgtaacaatggttaatgacgctctgttctttaatgaagtagcaagggaacgtagcgcgggagatgatgtattcggagccgcgatgcacagtcaggcgtggaatatcggcggtgccttttaacaccagatccaaccggtcttcataggggaagcgtgaagaatcttctttgactaaaaacagatgcaaccagtcgcactgtgccgcagcttgttgaatcagataacggtgaccattcgtgaagggattggcgttcatcacaatgcagccaatcttgttccctggatgacgaaattttttcagcgattcggcatagcgtttcagccgcgtggcgctgttttccatcagcaccatcacgccgggtacgctggtcagcgtggaaaaaccgcactggcggaacagcgcctcgtattcggttttggtataaataaacagatgcgtgctgtgccgctcataggcgaggtttatcaattcagtggctaatgtcagcgccagtccttcaccgcgaacggattcactgatagcaacgcatttaataatatttccggcaattccaccgcacgtgataagcttttcatcgcgggttacggtaataaatacttcgactgtggtgtcaacgctcggtaatgactccaacttattgatagtgttttatgttcagataatgcccgatgactttgtcatgcagctccaccgattttgagaacgacagcgacttccgtcccagccgtgccaggtgctgcctcagattcaggttatgccgctcaattcgctgcgtatatcgcttgctgattacgtgcagctttcccttcaggcgggattcatacagcggccagccatccgtcatccatatcaccacgtcaaagggtgacagcaggctcataagacgccccagcgtcgccatagtgcgttcaccgaatacgtgcgcaacaaccgtcttccggagactgtcatacgcgtaaaacagccagcgctggcgcgatttagccccgacatagccccactgttcgtccatttccgcgcagacgatgacgtcactgcccggctgtatgcgcgaggttaccgactgcggcctgagttttttaagtgacgtaaaatcgtgttgaggccaacgcccataatgcgtgcagttgcccggcatccaacgccattcatggccatatcaatgattttctggtgcgtaccgggttgagaagcggtgtaagtgaactgcagttgccatgttttacggcagtgagagcagagatagcgctgatgtccggcagtgcttttgccgttacgcaccaccccgtcagtagctgaacaggagggacagctgatagaaacagaagccactggagcacctcaaaaacaccatcatacactaaatcagtaagttggcagcatcacctcaacgctcaaatcattttcatgcaggaattgggcgatttccgccatttttttattttctgaacgttttacgcgggtgaaaatatcattgccgaacataataaatagtatcctgaaggtgcatgttgttatcgatttgcaacgaatgttgttcaatgttgcaagttgataaccttttattttcacttgggagaaaggggggtgatcgaggtatatctttttctcctttcgctatacattctaaggagtattgcagcgtgaaattttgatttatttcacatagagttagtggttttttatttatttaatggttttaagttttttaattaatgtaattacgaaatgacctgcaggtttaagtgatttaattgatttaatgaataaaatttgccacgatcataattaatatctatgtattttgattcaacattttaattacatccgtcaaagaggctcgggacaacccgcaaggaaaacaatgttgcagcttaacgagaataaacagtttgcatttttccaaagactggcatttccgctgcgtatctttttgctgattctggtgttctcaatatttgtcattgcagccctggcgcaatattttacggccagttttgaggactatttaacgcttcatgtacgcgacatggcaatgaatcaggcgaaaattattgcctccaatgacagtgtcatctctgcggtgaaaacgcgtgactacaaacggctggcgaccatcgctaacaaattacaaagagataccgattttgattatgtggtgattggcgaccggcactcgatccgcctttaccatcttaatccggagaaaattggttatcctatgcagttcaccaaacagggcgcgctggagaaaggggagagctacttcattaccgggaaaggggcaatggggatggcgatgcgcgccaaaacgccaatctttgatgacgatggaaaagtcatcggcgtggtgtcgattggctacctggtgagtaaaatcgatagctggcgggctgagtttttattaccgatggcaggcgtgtttgtcgtgctgttagggattctgatgttgctgtcgtggttcctggccgcgcatatccgtcgacaaatgatgggcatggagccaaagcaaatcgcacgcgtggtccgtcagcaagaggcgctgtttagttcggtttatgaagggctgattgcggtggatccgcatggttacattaccgccatcaatcgtaacgcaagaaagatgctggggctgagctctcccggacggcaatggttgggtaaacccattgctgaagtggtcaggcccgccgatttctttaccgaacagattgatgaaaaacgtcaggatgtggtggcgaactttaatggtctgaacgttattgccaaccgggaagctattcgttcaggtgatgatttgctgggggccattatcagctttcgtagtaaagacgaaatttccaccctcaatgcgcaactgacgcaaataaaacaatacgtcgagagccttcgtacattgcgacacgagcatctcaattggatgtcgacgctcaatggtctgttgcagatgaaagagtatgatcgcgtgctggccatggtgcagggggagtctcaggcccagcaacagcttattgacagcctgcgtgaggcgtttgccgatcgccaggtggcggggctgctttttggtaaagtgcagcgcgcccgcgaactggggctaaaaatgatcatcgtccccggtagccagctttcgcaactgccgccaggactggatagcaccgagtttgccgccattgttggcaatttacttgataacgccttcgaagccagcctgcgtagcgatgaaggaaacaagatcgttgaattattcctcagcgatgaaggcgatgatgtggtgattgaagtcgccgatcagggctgcggcgttccagagtctctaagagacaaaatatttgagcagggggtcagtacgcgtgctgacgagcccggtgaacatggcattgggttgtacttgattgccagctacgtaacgcgctgcggtggtgttatcactctcgaagataatgatccctgcggtaccttattttcaatctatattccgaaagtgaaacctaatgacagctccattaaccctattgatcgttgaggacgaaacgccgctggcagagatgcatgcggaatatattcgtcacattcccggattcagtcagatattactggcgggaaatctggcgcaggcccgaatgatgatcgagcgttttaagccggggctaatcttgctcgataactatcttcctgacggtagagggattaatttactgcatgaactggtgcaggcgcattatcccggcgacgtggtgtttaccactgcagccagcgatatggaaacggtgtctgaagccgtacgttgtggtgtatttgattatctcattaagcccattgcctatgaacggctggggcaaacgctaacccgtttccgccagcgtaaacatatgctggaaagtattgatagcgccagccagaagcaaattgatgagatgtttaatgcttatgctcgcggtgaacctaaggacgagctaccgaccggcattgaccccttgacgctaaacgcggtgcgaaaactgtttaaagagcctggtgtgcaacatacggcagaaacggtggcgcaggcactgaccatcagctgcaccactgccaggcgttatcttgaatattgcgccagccgctatctgattattgctgaaattgttcacggcaaagttggcagaccacaacgcatataccacagtgggtgacatgataaagccggaggaaacttgcctccggcattactatttacttgcctgtgaccgctgctgccgttcctggcaccatcagctctgtagcaacgataacaatcaccaaaccaacaagcaccggcaccgaggtgcgttttacgacttcaaatggtgagattttcgccatcccggcaaccgcaacgactacgccagaaacgggtgatagggtacgacccaggtttgacgcctgcagcatcgggatagtcaaatacgccgggttaatgccggaagagtgcgccagtttcgggatcatctcaacaaacgcataaaacggcgcattgcctgaaccggtcgtgactgccgccagcattgtcagaatcaccaataccagcatcaggatgatactcgccgaaccaaacgaggtagcgatagaaatcagactttgaataaagccgatggtgctaagcccctgagcgaataccccagcggcaaccagcagcatcaccacgttagcaaacgcatctgccatcccgcgataagccacttccagaccagagaaaactttctgggtattaaagctgcggaggaactccagaatggaggcaatcagcatacaaatcaccagaatagtgatgatgtgtaattgcggaccccatttaccgtcaaaaatcagtacaccgatgatcggcgtgaacggcaaaatggcataaaacgcaggagcagtggtggtgatttcactgacatctaacatttcatgagagatgtgctcttttttatccagataacgttgccagaagaagtgggcgatcgccatgccgataattgcagcaattgagataggcagcgtcgttttgaaggcgaagtcaatcagcgacacttcggaagcttgcgccgccagcaccacatcccctgaagtcggtgcgagaataatcgccgccggggaggcacaaatggcagcagctgcgccacgactgataccaacgtttaccatcaccggaaatagggttgccatcagcaaaacacccagaccggttgcggaagagacggccagagacatcagacaggcgacaaaataggcggcaatcatcagcaggtaaggggagttaatatactgcaatggttttgacgccagcttgaccaccatatcattcgcgccgatatgggtcatgtaagcggcaaatccacacagcatcataatcatcatgccgaggtcgccgccgcggctcattagtaatattttaacgtattcaacgatatccgtggcgctgtagcctgttgaagcctggctggacggtaacactttgtgccccataatggcactgataatcagcaataacaggccaccgacaaataacacaccagtggcggaataccctttaatgatgtagcgagctacacccacaataaccacaaccccaatggtgatgctgccaacttactgatttagtgtatgatggtgtttttgaggtgctccagtggcttctgtttctatcagctgtccctcctgttcagctactgacggggtggtgcgtaacggcaaaagcactgccggacatcagcgctatctctgctctcactgccgtaaaacatggcaactgcagttcacttacaccgcttctcaacccggtacgcaccagaaaatcattgatatggccatgaatggcgttggatgccgggcaactgcacgcattatgggcgttggcctcaacacgattttacgtcacttaaaaaactcaggccgcagtcggtaacctcgcgcatacagccgggcagtgacgtcatcgtctgcgcggaaatggacgaacagtggggctatgtcggggctaaatcgcgccagcgctggctgttttacgcgtatgacagtctccggaagacggttgttgcgcacgtattcggtgaacgcactatggcgacgctggggcgtcttatgagcctgctgtcaccctttgacgtggtgatatggatgacggatggctggccgctgtatgaatcccgcctgaagggaaagctgcacgtaatcagcaagcgatatacgcagcgaattgagcggcataacctgaatctgaggcagcacctggcacggctgggacggaagtcgctgtcgttctcaaaatcggtggagctgcatgacaaagtcatcgggcattatctgaacataaaacactatcaataagttggagtcattaccgacaacgtttagagaaaatattgcacaaacctggcaacagcctgaacattatgatttatatattcctgccatcacctggcatgcacgtttcgcttacgacaaagaaaaaaccgatcgctataacgagcgaccgtggggtggcggttttggtcagtcgcgatgggatgaaaaaggaaactggcatggcctgtatgccatggcatttaaggactcgtggaacaaatgggaaccgattgccggatacggatgggaaagtacctggcgaccgctggcggatgaaaattttcatttaggtctgggattcaccgctggcgtaacggcacgcgataactggaattacatccctctcccggttctactgccattggcctccgtgggttatggcccagtgacttttcagatgacctacattccgggtacctacaacaatggcaatgtgtactttgcctggatgcgctttcagttttgagacaaatgaagttttagtaacttctttaaaatcaataactaaaataagtaacatcaaaaataacgcgacttttatcactttttagtaaagttgcactggacaaagcgtaccacaattggtgtactggtaaccgacacagcatttgtgtctatttttcatgtaaaggtaattttgatgtctaagattaaaggtaacgttaagtggtttaatgagtccaaaggattcggtttcattactccggaagacggcagcaaagacgtgttcgtacacttctctgcaatccagactaatggttttaaaactcttgctgaaggtcagcgcgtagagttcgaaatcactaacggtgccaaaggcccttctgctgcaaacgtaatcgctctgtaagatacgtcagcaagaattcaaaacccgcttaatcagcgggttttttttggtctttagtgtgcggttgaggccgaaaacagccagaaagccagtgcggtcatggcaaaagaccccagaaggttgacgaaaacgttcagtaacgcccagccaaagcggccctcttgtaacaaaaacaccacttctgccgaaaatgttgagaaggttgttagaccgccacaaaatccggtggtgattaatactttccacactggatcaatgttcgtcatcctgctgaaccaggcgaatcccattcctatgatgaatgccccaatcaggtttgctgccagcgtccccaacggaatcgcctgatgcagcgggttaaatcgcatacttaacagccatctcgccacgcttcccgtaccaccgccaataaaaactgctaaaagaagttgtaacactgcaaaatcctgctatttgatttgtatgagtgataagtgtaacgccgaataatcgtcgttggcgaattttacgactctgacaggaggtggcaatgctggttgccgcaggacagtttgctgttacatctgtgtgggaaaagaacgctgagatttgtgcctcgttgatggcgcaggcggcggaaaacgacgtatcgctgttcgtcctgccggaagcattgctggcgcgcgatgatcatgatgcagatctatcggttaaatcagcacagctgctggaaggcgaattcctcggacgtttacggcgagaaagtaaacgtaacatgatgacgacaattctgacgattcatgttccttcaacgccggggcgcgcatggaatatgctggtggcgctacaggcaggaaacatcgtcgcccgttatgccaaattgcatctctatgatgcatttgccattcaggaatcacgccgtgttgatgctggtaatgaaatcgctccgttactcgaggtggaggggatgaaggtcggtctgatgacctgttatgacttacgctttccagagctggcgctggcacaggcattacagggagctgaaatcctggtacttcctgccgcctgggttcgcgggccgctcaaagagcatcactggtcaacgttgcttgccgctcgtgcgctggataccacctgttatatggtggcggcgggggagtgcgggaacaaaaatatcgggcaaagctggattatagatccctttggcgtcaccattgcggcagcgtcagaaatgcctgcactcattatggcggaagtgacgcccgaacgtgtgcgtcaggtgcgcgcgcaactgcccgtcttaaacaaccgtcgctttgcgccgccgcaattattatgatgtttttttactcggcgcttgattcaccttgttacagattgctattgtgtgcgcgcgtcgaatgaccgttaatattctctggtttttaaggcgcgttctgttgccggttatatgtcaagaaggtatctatgggggagattagtattaccaaactgctggtagttgcggcgctggtcgttctgctgtttgggactaagaagttacgtacgctgggcggagaccttggagcggccattaaagggttcaagaaggcgatgaatgatgacgatgctgcggcgaaaaaaggcgcagacgttgatcttcaggctgaaaagctctctcataaagagtgacgtggcgagcaggacgctccctcaatatcttgttcgatacaaaaaaaccgcttcaaaaagctaatgccagtcagttaagcaactgactggctctttttcggggctgtggggtatttccagggcctctcctttaccactctcgggaaggccctttcccttctcgtcggtaatttcacaagttgtcccatacttgcaagatcgcgcatcagctccggtatacgtcccggtgaagcgccctgcaatgtcatcagcattctcatcaccattccgcatgattctgagaaactcagttgattcggccagtaacctttcagatgttccgccattttaatcatctgatatctcaccagattataagccagtaagacaccccacagctcttgctccacaagctccggctttttacttctcagcgtcagcctgctcagttgcatcgtctgttttatctccctgtatcccagttcgatttcccagcgatgactgtacagatccgccatttctcctccggggaagcgcatggcgtccgtcatcgacgtcagcagatggcagacttttcctttgcgcgtcacggtcagcaggcgggctgtcacttcatttcccagtcccggccacttttttcgtgcctgcgggctggttttcagcttcaccagatgatcgcctttacccagttttctgagctcttcatattgcgctccctttctgagaggtatcatccagtggcggtgttctcccgccaggctccaggcatttaacagtcccagtgagtaataacctttatccattaacgtcagagtgttatcgccggtttgttctataagttgctcagcaagctcattttcgctgttcttcatcgtgccgaaggctgcagccgtcagcagatggctggtcagttccatctggcagaccattttgacctgcgggtagagcgccgggttcccggcatgtgtctggcgggggaaggctgcatcgttctctggtgtatccggtgtgcgccagaacacaccatcgatggccagcagggtcaggccgcaccagtgcggatgcggcgtggcgttatgccagagctgcgctgttttcgtgaacacgcggcggacagcctcacttcccaggcgctggcgggcctgaataacggcactgggggcaacgaaggggcgattgcccggcagcatgatgtccaggcgattcacaatctggtgaagaggttctttacgctcaagcgccatgccaacaatacaccagaccatcatttcgaggggaagacggcgcttgcgtagcgttacagtacctgattcggcaaggcaacgagagatgagttcggggtcgaggtaatcccccagagaagtcagtgggttacgcagagaatcgtaacgggataccagatcaagagcctgtccaatgtgcataaaaaaatccggaaacaagtgagcgtttccggattcttacacagccactggatcggtcaactgatccttaactgatcggcattacttcaaaaagcgggttttttatcagacagatgtaagtaattattacaggattacttaacttccatccctttcgcctgcaaatcggcgtggtaagaagagcggacaaacggaccgcatgcagcatgggtaaagcccatcgccagcgcttcggctttcatttcgtcgaactcatccgggctaacgtaacgttgaaccggcaggtgatggcggcttggctgcaaatattgccccagcgttaacatcgtcacaccatgacggcgcaggtcgcgcattacctcaataatttcttcattggtttcacccagtcccaccatcagaccagacttggtcgggatttccggatgcgcttctttaaagcgttccagcagcttcagcgaccagttgtaatctgcaccaggccgtacctgacggtaaatacgcggtacgttttccaggttatggttgaacacatctggtggcgttgcagtcagaatatccagagcacgatccatacgaccacggaaatccggcaccagagtttcaattttgatttgcgggcttttttcccgaatggcagtaatgcaatccgcaaagtgctgggcaccgccatcgcgcaggtcatcacggtcaacggaggtgataaccacataacgcagcgccatatcggcaatggtctgcgccagtttcactggttcattggcatcaggagctaccgggcgaccgtgggcaacatcacagaacggacaacggcgggtacaaatagcgccgaggatcataaacgttgctgtgccgtggttgaagcattccgccaggttagggcaggaggcttcctcgcagacagaatgcaggccatttttgcgcattgcggctttgatgccctggatacgtgtagagtccgctggaagcttgattttcatccattccggcttgcgcagcagggcttcgcgctctgttgccacgtttttaaccgggataagggccatcttatcggcatcgcggtatttaacaccgcgttccatcacaatgggtttactcatagcgtgcgtgttccagttgcgaattacgaaggaaagcgtttcaattcaatagattgttgtaattatcaactatttttgaattaacgactggcagtatatcattgaaacggacctgaaagcagccaaagcggtcgcgaaaatgtaaaattgttgttggattgtgccattttatcgttctgcgctgtgatctggctgtaacaatactttttcaaaatgcattacggataacatctattaccccgtgcaggatgggatcacgcaggctgaatttgttgtagtggatagagaaatctatttgctcctcatttaaggacggaaaaggcagtttttccagcggccagcaacgactaaacaggttataaaaacggctgggaataatcgctaacatgtcactgttggcaaccagtgcagcgattgtcaaaatgttgtagctggtgaaattgatttgccggtccggaaacatctcttgaactctctgccgcagaccgctgaaattttgcccttccggtaacaggagtacatgcgcagcgttgtcgatagtctctctgtcatcttctaaagagagtagtggatttccctcgcggcaaattaacaccatattgtcggtgaacagaacatgatgttgcaccgtacgattggtgcaaaacatgttatcgatgatgagatcggtttgaaactgactgagttggttttccgcgtcgctgatgggcgggttgcgcagtaaaagctgcggatagtgagttttaatcgcccgatagatgacaggaaggaccagggctccgaccgagggagtggtcgcaatagttatcgttcgttgcttatcatagcttccttcgatatccagcgcgccaagaatggactcaaggccctgactgatatactcatgtagatgcatcgcaaatgcggtaggagtgacaccctggcctttgcgaataaacaatgggtcagggaatataacgcgcagtttctgaatagactgactgattgccgagggggtcagattaagcactttcgctgcattaacgatccctttatgtacatatacagcttcaaaaatagtcagaaggttaagatcaatatttcgtaaggttgtaaatatttgtggtttaccttctgacgactttctgcttaaacagggttcaatttgattattactatccacgcacttactccaattttattcatggaaaaataatatttaaaaaaattacaataatcttatgtctaattggaacggaacgcttttgctcaccataatcaactatttcaataggttaatcaatggggtgagttacggagcaaggcgtagcaccgcatttctgcaagtgataaagaaagtatacaaacgcgaaggagatgtaaagcattagcaggtattatgagtaatgacccagtgtaaattgggccattgaggtatgcaattaagcggtaatatattcgaagtcaggattgtttagtagcgctaaaatattttccagtaaacgtggtgcaatattattagtcgtcgcttcgggtttccattgtgatattttagccatttccattccggcatacccacaaggattaatacgtaaaaatggtgaaagatccatattgacgtttaatgccagaccgtggaatgaacaaccgcgtcgaatacgtaaacccagtgagcaaattttcttttccccgacatagacaccaggcgcgtcagcccgaggatgcgcttctatacccagttcagccagggtattcaccactgtttgctcaagcaaggtcaccagttcacgcacaccgagtttacggcgtttcaggttaagcaacacatacatcacctgttgccccggcccgtgataagtcacctgcccaccgcgatcgctctggatcaccggaatatcacccggcattaaaatgtgctccgcttttcctgcctgaccttgggtgaataccggatagtgctcgaccagccagatttcatcaagggtactatcatcgcgggtatcggtgaattcatgcatagcctgggagattggctcgtaaggctgaagaccgagctggcggacaagaattttatcctgatacaaaactgcatctccgtggagaatgagtaaaagtgggggaaaagtatatcacagcgaggagaggggagttacccgaccaggggccgggtaacggagaagcgagttacagaaccatgcggacaatatcgattttgcctagttcttcatacagtgtttcaacctgctcgatatgagtggcgttgatagtgatagataccgagtggtagttgcctttgctgcttggttttaccgttggggtgtagtcacctggcgcatggcgctgtaccacttcaaccacctgatcaaccagctcaggtaacgcctgccccataactttgtaagtaaaaggagtagggaattcaagcagttcgttaagtttggttttcatgtcagctccggcgtaacgtaattaaatagcaactcccgccagaaggcgggagttttttactgatgcttagtatatggggacggaaattacactttcaagtgttcaatttttaaccaaaccagtgatggaacattaatttaatgtaatcaatgattttgccgaagaagttaccttccgggatttcttgcaacacaaccagcgggcgttgctcgatcgttttgccatcaagctggaagttgatagttccgacgacctgattcttttgcagcggcgcatgcaattcactgctgttcagcacatagctggctttcagatctttcatgcgaccacgtggaatggtcaggtacacgtctttatcaacccctaacgaagcgcgatcagaatcaccaaaccaaaccggttcagaggcgaactctttacctactttcagtgggttaacggtttcgaagaaacggaagccccaggttagcagttttttactttcggcttcacggcctttaaaagtacgtccgcccatcaccgcagaaatcaagcgcatctggccttcagtcgcagaagcaacaaggttgtaacctgctttgtcagtgtgtccggttttgatgccgtcgacattcaggctgttatcccataacaggccgttacggttcagctggcgaataccgttaaacgtaaattctttttctttatagatcgagtattcattcggtacgtcacggatcaatgcctggccgatcagcgccatatctcgcgcggagctgtactgaccatcagcatccagaccatgtaccgtctggaagtgggtatttttcaggcccagtgcgttaacgtagctgttcatcaagccaacaaaagcgtcctggctaccagcggcaaaatcggccatggcgacacaagcatcgttacccgattgcaggttaataccgcggatcagctgagaaaccggaacctgcatgcccggtttgaggaacatcagcgaagaacctttaaacaccgggttaccggtggcccatgcgtcgttgccgatagtgactaaatcagtttctttaaatttaccggctttcattgcctggccgataacgtaactggtcatcattttggtcaggctggcaggatcgcggcggacatctgcgttctgttcggcgagcactttgccggagttatagtcaatcaggatgtaggactccgcatcgatctgcggtacacccgggatcatagttttgatattcaggtcatcggcatgtgcagcagagataaaggctgtgcaaagagccgtggtgagcgccaggcgcttcatgatacgagcggaaaaaatggtattcatggtctgaactacgacatccgtgatggaattaaaaaagtgccctactatagcaaatgcactaccggcaggcatctgactttccgcgtgactttgttaacgtcatttacagaaattgacacatcagatgcctgctttacgctactgcgcggtagtaataaatgactgtaattgggcttcggtttgcaaacgttgctgcaaggtactggcttcggctttgctggcgaatgggccaagctggatccgccagaccgcgccattttgagttacgcgaccggggacgccgaacttctgtcccagttgctgttggtactgttgcgcacgagcctgatcgcttacggccccgacttgcaccataaagttgccgctggcgctttgcgaggcggcttgcggtgtcaccattgcaggcgaggttgcaggcgttgtcgacggagctgtaacaacgggctgtggcgcaggcgtcggttcgctgccttccagtacaccaggcgctaaggtcgttggagcgccgaggaaaccgctactggttaccggcgcgccggtcggatcttcgctttttagcgtcgaattactgaccggaagaatgtcaccctgcgggccagacactgaacttgttcccgcgccaccgcttaaatcgggaggtgctggcagggcgtaagtctgtttggcgactgtggtacaagccataccaggaccagaaagcgaaccatcctgggcgacaataatcggatcgatacgaactttggtgttgtttgacgtgttaagacggtcagctgccgcgcgagaaagtgaaataacgcggtcgttgccgtaagggccgcgatcattaatgcgcaccacgatcattcgcccgttagccaggttagtgattctggcgtagctggggatcggaagcgttggatgggccgccgtcagctgtgtcggatcgaaagcttcgccagaggccgtcaggttactgccgggttcggcatcatagattgccgccagtcccgcctggctaaatcgagacggatcctgcacgattttgtagcttttaccgtcgcgctggtaatcctgatttgccgtcgcgttcagtggttcgaaacgcgggtccgccccgctaatttcaactatggggccgttacataccgcaggctgcggtacacttaccgtctgttgctgaccatcatcgcttgtacatgccgcgagcattcctgccgcgatgcagatcccgagccactgcttacgcattgcgcacctcttacacgcttttcgacaacattttcctgtgggtgtggattgacattacaatcccgaacccagccatcagcacaattagcgccgatcctccataactgaccagtgggagcggaacccctacaaccggcagaataccgcttaccataccaatatttacgaagacataaacgaataatatcagcattaagccaccagccatgacgcgaccaaaggtggtttgcgctctggcggctatccacagcccgcgcatgatcagcagaatgtagagagcgagcagaatcagaatgcccactaatcccagctcttccgccagtaccgcgaagataaagtcggtatggcgttcggggagaaattcaagctgtgactgagtgccgtgcagccagcctttgccgcgtaatccgccggagccaatagcaattttagactgaataatgtgatagcccgcgccgagtgggtctgattccgggtctaggagcatcattacgcgctggcgctggtaatcatgcatcaggaagaaccacagaatcggaatgaacgccgccaccagcactactgcgacgccaatcagacgccagctaaggccagagaggaacagtacaaacagaccggaaagcgcaacgaggattgatgttcccaggtcaggctgtgcagccaccagcagcgtgggcataaatatcagcaccagcgcgatgccagtgttcttcaacgatggcgggcaaacgtcgcggttgataaagcgcgcaaccatcagtggtacggctattttggcaatttccgacggctgaaaacgaacaataccgaggtccagccagcgttgagcacctttagagatggcaccgaaagcatctaccgccaccagcaaaataatacagatgatatagagatagggggcccagccttcataaacgcgtggaggaatttgcgccatcaccaccatgatgactagacccatcgcgatttggccgattttacgctccatcatgccaatatcctgaccgctggcgctccagataaccagggcgctgtaaaccagcaatgccagtaagatcagcagcattgtgggatcgagatggactttatcccagaatgtttttttattcggattatccgtcatgattaatggtcctccgctgcggcaaccgctggattttccgcaggcagatcggtgttgttatcacccagcataatgtggtcgaggatctggcgcatcagtgtaccaaccgccggacccgcaccaccgttctccagaatcatggcgacagccacttgcggattgttgtatggcgcaaaggcggtcatcagtttgtggtcacgtaaacgctcggcaattttgtgcgcattataggtttcgttcgctttcagaccgaagacctgagcggtaccggatttcgccgcaattttgtacggtgcgctggcaaagtatttatgcgccgtaccgttagggcggttagcaacaccgtacataccgtctttcgccagctcccagtaaccggaatgaatatcgccgacgggcggttcatgcggctgtacccatggcacctgtttgccgtcttcggcggtgctcatcagcaaatgaggaaccttcacgataccgtcattaatcaggatcatcagtgccttactcatctggattggggtcgctgtccagtaaccctgaccgataccaaccggaatggtgtcaccctgataccacggttttttaaagcgtttctgtttccattcgcgggtaggcatgttgccggaacgttcttccgccaggtcgataccggtgtaatgaccataaccgaatttacccatccattcggagaggcgatcgatccccatatcgtaggccacctgatagaagaaggtatccgcagattcttccagcgatcttgtgacattcagacgcccgtggccccattttttccagtcacgataacgtttttccgaacctggcagttgccaccagcctgggtcaaacagcgtcgtattgcgcgtgatcaccccggcgctcaatgccgaaaccgccacatagggtttaactgtagacgcgggaggataaaccccctgtgtggcgcggttcaccagcggtgtattcggggcgttcaacaaggcggaataatctttgctggagataccgtcaacaaacaggtttgggtcataactaggcgtggaaaccagcgccagcaccccacctgtacgcggatcggtgacaaccacagctgcgcggctacccgccagcagcgtttcaatatattgctggagtttgagatccagcgtcaggtaaatatcgtgtccggcttgcggtggtacttcttttaactggcggataacacgcccacggttgttaacttcaacctcttcataaccggtctgaccgtgcagcacgtcttcatagtaacgctcaatgcccagcttaccgatatcatgcgttgccgcatagttggccagtttgccgtcattattcaggcgttcgacgtctttatcgttgattttcgacacatagccgatgacgtgggtcaacgccgaaccgtaaggatagtaacgacgtttatagcctttaacttcgacacccggaaaacggtactgattgacggcaaagcgagctacttgtacttcggtcaggttagttttcaccggaatagaggtgaaacggtgtgaacgtgcgcgctcttttcggaatgcagcaatatcgtcatcggtcagatcaaccacgctgcgcaaagcgtccagcgtttgctgcacgttatcgactttctctggcatcatttctatctggtagatagtgcggttgagggccagagggataccattacggtcgtagataatgccgcggctgggcgcgataggcaccagcttaatgcggttttcattagagcgagtctggtagtcggtaaagcgaacaatttgcagattatacaggttggcgataagcacgccggtcagcagcaaaatccccaaaaaggcgaccagcgcccggcgcacaaacagcgcggactctgccgtatagtcgcgaaaagagttctgtagtttcatccgctgcgttttctactcaaagctcccttatcactcacggtgataaggatggttggtggtgatgctccacgcccggtacagactctctgcgaccagcacgcgaaccagcggatgggggagggtaagcgccgacagcgaccagctctgctccgccgccgctttacaggcaggcgacaacccttcaggcccgccaatcagtagactgacgtcgcgaccatccagcttccagcgttccagctcagcggctaactgcggcgtatcccagggcttgcctggaatatcgagggtgacaatgcggtttttgcctgcggccgccaacatctgctcaccctctttgtcgagtatgcgcttgatgtccgcattcttgccgcgttttccggccggaatttcaatcagctcgaagggcatatctttcggaaaacgacgcaggtactcggtaaaaccggtttgtacccagtccggcattttcgttcccacggcgacaagttgcagcttcacgcattaactccagagtttttccagttcatacaggcgacggctctcttcctgcatgacatggacaatcacatcgcccaaatccacgacaatccagtcggcgctgttttcaccttctacgccgagcggtaacaggcccgctgcgcgagactcctgcacaacgtggtcagcaatggacataacatgacggctggacgtacccgtacagatgatcatgcagtcggtgatgctggatttgccttgaacgtctaaggcgatgatgtcctgacctttgaggtcatcaattttgtcgataacaaaatcctggagtgctttaccctgcaagttttccccctgggtgaatcaaatagataaaaatggtctgtcagtatacctgaaccagaggcgatttcgggacaattgtcgccgaatcggctttcgaaagtgggctatcatcccaccccgcgccgcagattgcatcgccatttttgtaaaacaatttctacaaagtcgtgtctggcgaaaaaagtctggctgcggagaatatcagcctgcccgggtctgtcaatggtcgttgcggcttacccgtaaaaaaacagaaaagtcatgcattctcgaccccgatggcacggctattgaggacgcgtagcgtcgcgaatttttggttgatatcaatggcgctccaacacccctagtcaacgcgaaaatgccacatagcctcggcaggcatgccaattaaacgggcgattaacagactcagtacaccctgatggctgacgactaaaatattctgatagtgctgaaattcactaagccttgcgataaagcgttccacacgttgcgaaaatgcctgaaatccttcaccgttcgtggggattgcatgctgccagtcattgcaccacgcgctatagttttcggcatcttcttgcatgaggtcgcgatgatgtcgcatctcccagtcgccaaaaaacatttcgttgagttcagggatgatttgcacggggagctggcggtcactgagaaccagtcgtgcggtatgctgtgcccgttccagttcactgcataaaaccagatcaaaggaaacaccatgtagcagcgtatgcagattttgcgcttgctcaataccgcgcgcggtcaggggggtgggcgcatgaccgctgtaaagaccatcgatattcgcttgcgtttcaccatgacgaattaaccacagtcgcatcatgccctccgtaacgacaggtatcagcgatacaagccttgttggttaatgtaagtcagtaccggttccggcaataaatcctcacacgattcaccgttttgcaaacgttcgcggatgatggtcgccgagatgttaaaccacggcgtttcagccagataaattttaccggcaggctgaaggtgaagatcttccgggttatgtgtcaaatgatcttccagccattgctggtattgcggttgcgccatttcaagtgggtaacctggacgccgacagacgatcaaatgtgcattgtcgagtatcgtttcgtattcgtaccaggtcggaaaggtcagcagtgaatcctgaccaataataaacgccagcggcacgtccggtccttgttcctgccgccactctttcagtgtttgcgcagtgtaagagggggcattgcgctttagctcgcgttcatcaagagtaaataatggcttgtcggcaatcgccagttcaagcatgtgtttacgctgcacgctgttcgcttccggctggggacgatgcggaggaacattattagggatgattgtgacccgcgtcagaccaatcaaattcgccagcgtttccacgggttttagatgaccatagtgcaccggatcaaaggtgccgccaaacagagcctgtaaagatttcatatcaaccgtcgataaatacgtccgccaggggtttatggcacaacagaagagataaccctttcagctctgcccacactgactgaccgtaatcttgtttgagggtgagttccgttcgtgtcaggagttgcacggcctgacgtaactgcgtctgacttaagcgatttaacgcctcgcccatcatgccccggcggttctgccatacccgatgcttatcaaacaacgcacgcagtggcgtatgggcagactggcgtttcaggttaaccagtaacaacagttcacgttgtaatgtgcgcaacaaaataaccggttcgctgccttccagacgcagttgctgaagaatatgcaatgcgcgcttactttttcccatcaacaaagcatcaacccaatgaaaaggggtgaaatgcgcggcatcattcaccgcctgttcaacgcgcggtaatgtcaatttgccgtctggccagagcagcgataaacgctccagtgcctgagccagcgccagcaggttaccttcataacagtagcagagcacctgatttgccgcgtcatccagttctaagttgagctgttttgcgcgcgcagcaacccagcggggaagctgagcctgctccggtgtctgacaggtcacctgcacgctgcgattcgcaagagcagtaaaccaggcggcattttcttgcgctttgcttaatttattaccgcggacgatcaacagcaggtcgtcatgcagaagtccggtgagtgtgagaagttgttcattgatcgccgcattcggtccgttttctggtaacaacagcaatagcgtttgtcgactggcaaacagactcatagcctggcataacgaaaagatcgcattccagtcagtgttgggatcaatggaaaaagtgtggtgttcttcgaatccttgtgccgcagctacctgacgaacagcgtcctggctttcctgcaataacagaggatcgttaccaagtaaaagatacgccgcgcgcagcccttcattgagctgcgcgcggagttgttccgggtacaaccgaatcatcagttacccagcgtggtggagacgcgtgcaggcgttgccggagtatccgttgtggtcgacgtctgttcttcgtcggaacgaatatccgcagcacggatgcttggcagcttacgaatcagctgttcggcagcacggtcgtacatctcttttacgatcatgtcttgttcgttatctttcgctaacgccatttgcgggttatcaaagaacgaacggaagactttggcgctaatcgggtagatatcacggccggggatcaacacggtcgcattcaccgtcatgatcatctgatactctgctgtttgaccgttacggaataccgatgcggtatctttcgcgatgctcactttacccaaacgcagggatggaacgtccttacgcgtggtttctttatcaagcaactcgacaccattcagacgtaactggttacgcactgcacggcttaatggcccgttcggatcgcctgagtccaggatcatgaccttcatagtggaaggaacctgcgtggtatcacgcagatgccagccacacccggcggtgattaacaccgccagagataacaacaatgttgccagatatcgcacgcttcctcccgcgcttagccaacgaccagattgaggagtttacctggtacgtaaatcactttacgcacggtaacgccatcaagatattttgctaccagatgttcctggccagcacgttcgcgaacctgttcttccgttgcgtccaccagaacggtgattttggcacggactttaccgttaacctgcaccacgaccagcgtggagtcttccaccatcgctttttcgtcagcaaccggccacggcgcgttgtcgatatcgccttcgcctttcagttcctgccacagcgtgaagcagatgtgcggggtgaacgggttaagcatacggacaacggccagcagcgcttcctgcatcagagcgcgatcctgctcgccatcggttggtgctttcgccagtttgttcatcagctccataatcgccgcaattgcggtgttgaaggtctgacgacggccgatatcatcggtcactttagcgatcgttttatgcacatcgcgacgcagcgctttctgatcttcagtcagcgcatcaacgttcagtgccgcaacatcaccttttgctgtgtgctcgtaaaccagtttccagacacgtttcaggaagcggttagccccttccacaccggattcctgccattcgagagtcatatcagccggagaagcaaacatcataaacagacgaacggtgtccgcgccgtaacgttcaaccatcacctgcgggtcgataccgttgttcttcgacttggacattttgctcatgccggtataaaccagttcatggcctgccgcatctttcgctttcacgatacggcctttctcgtcacgttcaacgatagcatcaaccggggaaacccagttacgttcgccgttttcgccaacatagtagaaggcatctgccagcaccataccctgacacagcaactgtttcgctggttcgtcagagttcaccatgcctgcatcacgcatcagtttgtggaagaagcggaagtagagcaggtgcataatggcgtgttcgataccaccaatgtagatatccaccggcagccagtagttagccgcttcggaatccagcataccttctttgtactctgggcaagtgtagcgcgcatagtaccaggaggactccataaaggtgtcgaaagtgtcggtttcacgcagcgctggcataccgttaacggtagtttttgcccactccggatctgctttaatcgggctggtaatgccgtccatcaccacatcttccggcaggatcaccggcagctggtcgtccggggtcggcattacggtaccgtcttccagcgtcaccatcggaatcggcgcgccccagtaacgctgacgagaaacaccccagtcgcgcaggcggtagttcactttacgctcgccaacgcccatcgcagtcagtttatcggcgatggcgttgaaggccgcttcatggtcaagaccgttgaattcgccagagttgaacagcacgcctttttcagtcagggcttgctgagaaagatctggctcagagccgtcagcagccaggataactggtttgatgttcaggccgtatttagaggcaaactcgtagtcgcgctggtcgtgacccggaaccgccataactgcgcccgtgccgtactccatcaatacgaagtttgctgcccaaacgggaatttcttcgcccgttaatgggtgaacagctttaaagccagtatcgacgccttttttctccatcgtcgccatttcagcttcggcaactttggtgttacggcattcgtcaataaaggccgccagttcaggattattttccgccgctttctgcgccagcggatgacccgcagctaccgccaggtaggtacaacccataaaggtgtccgggcgggtagtgtaaacggtcagcatgttgtcatagtcgttaacgttgaaggtgatctccacgccttcggaacgaccgatccagttacgctgcatggttttaacggtgtctggccagtgatccagtttatccagatcgttgagcagctcgtcagcgtaagcagtgattttgataaaccactgcgggatctctttacgttcaactttggtatcgcagcgccagcagcagccgtcgataacttgttcgttcgccagtacggtctggtcgttcgggcaccagttgaccgcagaagtcttcttatataccaggccttttttatacagctcggtgaagaatttctgttcccaacggtagtattccggcgtacaggttgccagctcgcggctccagtcataaccaaagcccagcattttgagctggtttttcatatacgcgatgttgtcgtacgtccacggtgccggagcggtgttgtttttcaccgccgcgccttccgcaggcagaccaaacgcgtcccagccgatcggctgcaggacgtttttgcccagcatacgctggtagcgggcgatcacgtcaccgatggtgtagttacgtacgtggcccatgtgtagtcgaccagaaggatagggaagcatagacaggcagtaatacttctctttgctctcgtcttcggttacttcaaatgtgcgcttctcatcccaatgaagctgtactttggattctatctcttccgggcggtattgctcttgcatggcagccagtggtcctgttttcaatacggctacaaatgtagcgttgaggtggtttttcagatccgcatagcatagcccaaacgtccgcgtcaaaacagcctttcgcgcactcgacgttgaaatgatgcccggattattcatacattaatttacagagtttgtgggcgtattagcaaagcaaggaacaaagaacgtctattattatagtcagttaacgacccgggagatgaaacgatgaacaaggttgctcaatattaccgtgaactggtcgcgtcactgagcgaacgcctgcgcaatggcgaacgtgatatcgacgcactggtggaacaggcgcgcgagcgcgtaataaaaacaggggagttaacgcgaaccgaggtcgatgagctgacgcgagctgtaagacgtgacctggaagagttcgccatgagctatgaagagagcctgaaagaagaatctgacagcgtctttatgcgggtgattaaagaaagcttatggcaggagctggcagatatcaccgataaaacgcagcttgaatggcgcgaagttttccaggacctcaatcatcatggggtttatcacagcggagaagtggtcgggctgggaaatctggtctgcgagaaatgtcacttccatctcccgatctacacaccggaagtgctgacgctatgcccgaaatgtggtcatgaccagttccagagacgcccgtttgagccgtaatagtctgatttcgcacagcaataaagagaatatgggccgaatgaaattccccggcccttgtttttatctctacagtaaatcttcagtctcacgaatttcctgactgacatctctggttccggatgactgaactttacgatacaggtcgagagcctgtcggagatcgacaggtcttccttctccgtagtgatacataatggccaggttataccaggcagtggcgtcattgcattcagcggctttcgtaaaccattcaaaggcagcctgataatctttctcaacgccttgtccgtgtttatacatataaccgatgttgacgtaagcgccgacgctttcctgagcggcagccttcagataccagtacatcgcttgcttatagtcctggtccaccccttcgccagcgttataatcccatgcaatttgaaactgggcgtgccgattaccctgctgtgcgcttttcaaataccagaatgcggcgagtgtcttgttttgagcaacgccttttccgtcttcataaagatcggccagattgttttgcgcgtcactatggccttgtaatgcagcttgtttgtaccagaaaaatgccagcgcatagtcttttgcgactccgttgccatttctgtacatccacccaagattattttgcgcataagacattccgctctccgcggctatctgataccagacaaccgcttctttataattgggggcttctccacgatccagtgtccagccaagggcgttggaagcgaaagtatggccttgtagggcagcttttttcagccagaagatggcttgctcattatctttatgacggcttttatcctcggtatacttttgccctaaggaatactgtgcttcacaatgaccttgctcagcggccagcttcagccagtaaaaggccttttcgtcgtccggagagtcaattgcgctatcgcgattataataaaacccaacaatatattgagcctcgcaatcgcctttttcagcacgttcgataatctcatctattgataaattatcgcagcaacttgacgtaaaaaccattatcatttccttatggttgtagataaaacatattatatttttatgtgttccatttttgcgtaagccttattttatgcgtattatgttgcgtcagaaaagtataaataactgagtctcgaaatgtagtttacattcattaaatgaatgtttaaggataaattatatggacatggggtcgcaaaaaatattgtttgcactttccactccgatggaaatacgcaatgaatgctgtttaccttcgcattcatcccccaaaatgtatttaggtacatgcttttttgacctttcttcctcatggggaattgatgaccgtgatgacctgctgcgcacaattcaccgaatgatcgataacggtcatgccgctcggttggcagggttttatcaccgctggtttcgttattcgccatgtgaatggcgtgactatcttgctgaactaaatgagcaaggtcaggcttatgcgcaatttgtcgccagcacagccgaatgctgtggtgagggaggaattaaagcatgggattatgtccggatgggttttttaagtcgaatgggcgtacttaataactggttgagtgaagaagaaagtctatggatccagtcgcgtattcatctacgggctctacgttattatagtaactggcggcaatactttgccggttatacctttggtcggcaatattggcagtctcccgaagatgatcatctgcctttattacgcgaattcttagctcgtaaagaatacgacgattccggcaatgatatgttttatcaattatttgccagtgatgatgcgtattaccctgccttgtcctggcaaccactggctgactaccccacatgcccggaaacgcttaaggatatgagcgacctatgaaaaattgctggaagatcctcgaaatagaggaaacgactgacgtcgatattatccgccgcgcttatctggcgctgttaccgtcctttcatccagaaaccgatccgcagggttttaaacaacttcgtcaggcgtatgaggaggcgctccggattgcgcagtcgcctgctaaatctgtttggcaaccagaagaatatgaggtagcagaacatgaaattctgctcgcctttcgcgcgttacttgcctctgatagcgaacgttttctgccctccgcctggcagcgattcattcagcaattaaattattgctcgatggaagagattgatgaattacgctggtcgctgtgcacaatcgccatgaacactgcccatttatccttcgagtgcgtggtgttattagcagaaagattgcggtggttgcaggaggaaaacgtcggggaaatagacgaagaagaactggaatcctttttatatgccattgcgaaggggaatgtttttaacttccagaccattctgcatctgcccgttgccgtgcaaaatgacaccatcgatttttaccaaatgttcgctcggatttggtcatcgcatccagaatggctgacattgtatttagcgcaacatcgcgcagtgatcatccccgatgatgcaaaactgcacagaaatttactccgctggtatagcgcaggtcgcctggatatccccgaacttctggattacgcccggtcgtggcgggaagctgaacctgataatgaagatgcgcgttattatgaatacgcgcaacgcgtctattgtggagaaggcgaaagcttgctggcagaactttgtgactactggcgcgagtatccctccacccaggcggatgctttaatattgcaatggtgccgtcagcatcgggtcgattattacccgttagtggtgatgatgattgaagctcgtgaactggttaacgatcagggtaaacagctactttatgtccccggcgacagcgcccgtacgcgttttcatttatacgaaatactcagcgatgaaaaactctctgcgctggggcgttcactggtcgagatggttttgcacaaaggacgtaagccgcggatctcactcacgcgtgatacagaacatcccttatggccattatatttagttgccaaacaattagtgcaggccagccaaccgacagaagaatcattaatgccgattgtgagccgccttgatgcagaagatcgttgtccactggaagcattaattattcgtcgattattaattcaggcggcgaattttaccggtcaggaaaccgtcgagccggagccgcaaccgcagccaatgcccgttgacgatggcgggctgggctgtctgggcgtcatcaaaattattttctacatttttatctttgccggtttgataggaaaaatactccatctcttcgggtgacagtcgacgttaatgtgcgggaagtccggcaagtaatctttccgcatttttgtaatgttgtttggcggccagttttaaccatttttgagattcataatggttaacattaataccagtgccatttctgtagatcaaacccaaagtatattgagcatgagcatacccttgttcagctgcttccttataccagagaattgctttacgggtatcgggtttgactcccaggcctttcaggtagatccaccccagtttgctttgtgcgcgcggattttcctgttctgctgattgctcataccagtatctcgcctgtgtataatccagtggtttaccgtcgctaccatgaagataaaattcgccaaggcgatattgcgatgttgagtgaccatgaatcgcggaaagctccgtggctgccgtggttaacggtagactgcctggtgatcttaaataatcaaaggcataattcaccatggctttatcacgcaacgtcgttttcttgggttggctaatacaggtaattgctgcaactataaaaattgcgaatatatacattgattttttattcatgtgtgaatgcttcgattttctttttattttgaaagcgtcaagtttatactcatcaataataaaaaagtagtcagttaatgcacttaagggattattaaaaaatgaataaggaagaacaatatcttctttttgcgctttctgcgcccatggaaatacttaatcagagttgcaaacccgcgcatgactcgccaaaaatgtatactgggataaaagaattcgatctctcatcatcctggggaataaataatcgtgatgatttaattcagactatttatcagatgactgatgatggtcatgccaatgatttagctggcttatatctgacatggcaacgctcttcccctgaagagtggaaagcattaattgctggtggctcggagagagggttgatttatacccaattcgttgcccaaaccgctatgtgctgtggagaagggggaatcaaagcctgggattatgttcgaatggggtttctgtcacgggtcggtgtgctcaacaactggctgacggaagaagagagtttatggctgcaatcgcgcgtctatgcacgagctcaccattactatcacagctggatgcactatttttctgcctattcactagggcgtctctactggcaatcttctcagtgcgaagacaacgcttcgctacgcgaggcgctaaccctgtacaaatacgatagcgccgggagtcggatgttcgaagagctggcagcgggaagcgaccgtttctatgccacgcttccctggcaaccattaactgtccagcctgaatgcccggtaacgcttaaggatgtgagcgacctatgaaaacatgttggcaaatcctcgaaattgaaagcacgacgcaaatagacattatccgccaggcttatcttgctcgcttaccgttgtgtcatcccgaaaccgatccgcaggggtttaaagcattacgccaggcctatgaagaggcgctgcgactggcggtaaatcctgtcgaggaagcagatgatgaagaaaaagatgccaccgctgaacatgaaatactacgtgcattcaggacattactggattcagaaagtgatcgttttcagccctccgcctggcagaaatttattcagcaattaaatacctggaacatggaggatgtcgatcaattacgctggccgctgtgtgcaatcgctatagaagcgcgatatctttcattaaattgtgcttctttgttggcagagcgtttgaactggcattcgtttaatgacagcgaaggaatggatgaggaagaaagggaggcttttcttgaggccattcaggctggtgattgtttcgatttccttagccttctggaatatcccgtcgcgttacagaaccagactgttgaatattacttcgcgctggaacgttgctgccgttaccatcctgactatgtcactgcgtttttggcgatggaaggaccgtggttcattcctgatgatgcaaagttacatcgcaaactgttgcgctggtacagctcggtgcaaacaggtatggcggaactcattcctgtagccaaacagtggcaagcggaagaaccagaaagcgaagatgcccggtattaccagtgtgcacaacgtttgtactgcggcgagggggaaagcctgcttgccgatctctgcgcgtactgggaaagttacccatctacacaagctgataatttgttgttgcagtggagcaagcgtcattgcccggattatttcgcgttattagtgatggttatcgaagcgcgaagcatggtagatgcgcaaggtaaaccgttgaaatatgttcctggtgagagcgcccggacgcggctgttatgggcggagattttacatagcggaaaattatcgccgttaggtcaatcgtttattgagtcgttattcttcaagcgcaaagcatgggcgtggtggaaatcgagagtcggtagcgagacagagcaagattcaccgttactggatttgtatcgggtagcggaacaggttgtgctggaagcgttcccgaaacaagagatgctggcccgtcttaatacaaggctggaaggtggagatgctcatccattagaggccattatcacccagatgctgttgacgaaagtgaaactcgagccggaggatgaagatgtcgatgagccaacacctgaaaaccatgaagaaaaaaatgatgaggatgaaaaaccacagagcattaccagtattatcaaaatcagcttaacggtgctgatgataggttatgcgctcggaaaaatcgcgatgttgtttagctgaggatgtgttttttgcgccgatgccggatgcagcgtttatgccgcatccggcagccgtgtttaagggatctcaatagccaaataatcgctcgcccgtcgacgaacttcatcgacgcgggccatatcgtttgactgcaacgccgcatcaaaatcggtgatcacccggccaatctcttctcgctcgtcacccagcgcccgcgcccacaactcttccagtttggccttaaaggtgcggttgattagcatatcgcgcggataaattttcaatgcggataaccgcgtccgactctcttcaatctgctgcgcgctcaatgttaccgggctatgattaatgactctggacttaacgctgccatcttccagaagcacgtcaacttcaagcaagccgttgatatcataactaaagcgaatatcaatcgactgataagccccggttttcttcaacggcacatcgaaggattcaaccagaatgttatttttaactttgtggttttctccctgatagacgttaaccgtaatagaatcctgttccgggtgcatggtcgagtaagtttctacacgcgacacgggtactgtggtgtttcgttcaataattggcgagaaaatgccggaaacgccctggcggttaacttcaacgcccaacgagtaagggcaaatatcagtgaggatcacctcttcaatatcttcactgcgtaagcggcaggcggcctggattgctgcgcccagcgcgacaatggtgctcgggtcgtaactttgatacggtaatttgccaaacagacgcacggcgattcgctgcaccagcggcatttgtgacgcgccgccaaccagcaccagactgtcgatttgactcggcttcagacgtgcatcgcgcaacgcctgttcaatcggcactcgcaagcgattgagcagcggcaaccacaaatcttccagttcgttctcgtaaaattcgcactcccgcgtttcatcctggtactgccagcgaatgtgcaatggcgattgattgctacattttgccgcttccacacaggcgtacaaggctgccagttcactctcgttaagcgtggtcctggcgacatccgcgcgctttaaaacgtcatcgaccaacatatgggtaaaatcttcgccaccgaggaagttatcgccagcggaggcgtgaacttcaatcaccggcgtggcgtattcgagcaccgtgacgtcaaacgtgccgccaccgagatcaaaaaccagcgagcgggtattttgttgcgtatgcaggccatatgccatcgcagctgctgtgggttcattaattaagcgtaccgcatttaacccggctaactccgctgctaaacgggtatgcttgcgttgttcatcgctgaaataagccggaacggagatcaccacatctttaatcggacgttgcagaaattcttcggcatcttcttttaatgagcgtaataccaaagaggacagttctggcgcgttaaatgtgtcgctgcctaaccgccagttggtattactgcccattgcacgtttaaataacgctgccgttttatccggatgcgaagtacgccgtgatacagccggttttccgactaaaatatgattattttcatccatgctaattatggatggtgttaaatattcaccgaacttatttggaattaattgcgcggcaccgtctttccagacggcaattaaactattggtagtgccgagatcgataccaatggcgagttctgcattatccattgcatttatatcttgaaagaaaaagagataaacagataaacagattaagaccacccaggtaacgcgtggtgatcttaatcaatgacgtgtgttaagcgtaaaatttcagacgatcagccagtaaatcaacaaagccctgacgatcaacatcgaccattacagtggcattcggtttattgccagtcagataataataatcaacaaccgtcataccctggctatatttcccctgtgtttccacgccaacccagcgctcaacagtggtaaacaactcgggtttcaacagccaggcgatggtgcatgggtcatgcagcggtgcaccgacaaagccccatttttcgtctttatgatattcgaggaagaaatccagcagttcggcaacaatggttgaaacagggttgccaatcgcgcggaaacgctcggtgtcttcaacgtggatttgtgctttgtgagtaacatccagaccggccatcaccactgggatccctgactggaagacaatttctgccgcttccgggtcaacgtaaatattaaattcagccgcaggcgtccagttaccaagccccattgcgccgcccataatcacgatacgggcaattttgctatgcagttccggatggctattgagcagcaaggcaacgttagtttgcggtccggtagacacaatcgtgacaggttccgcactttcgcgcagcgttttcgccatcagctctaccgccgtacagttttgcggtgcgaacgtcggttccggtaatgccgggccatccagaccgctttcgccgtgcacattgtccgcgataatcaactcacgcattaacggttttaccgcgccgcctgctaccggaatatcggtgcgattaagcaaggtcagcatacgcagaacattgcgtaaggttttttctggtgtctggtttccggcggaagacgtaattgctttgacatcaagctctggtgaggcgagggcgagaactattgcgatagcgtcgtcatgacctgggtcgcaatctaacagaattggcagtgccattgttgctccttgttgtgtgcttctttgcgacaagggtaacgccaggatgtaacagatacgaggggcgaaacgataaagcgtgagatggcgcgcacttgggtatgcgcgccagagtgattaatgcaggattttcgcgaggaagtctttcgcgcggtccgatttcggatcatcgaagaaagcgtctttcggcgagtcttcgacaattttaccctcgtccataaagatcacccgattcgccactttgcgggcaaagcccatttcgtgggtcaccaccatcatggtcattccttcgttcgccagttccaccatcacgtccagcacttcgttgatcatctccggatccagcgccgatgtcggttcgtcgaacagcatcgcaataggatccatacacaatgcgcgagcgattgccacacgctgctgctgaccgccggaaagctgcgccggaaatttattggcatgtgcggaaagtcccacgcgctccagcaatttcaatgctttttcacgagcgggcgctttatcgcgtttaagcactttcacctgcgccagggtcaggttttcgataatcgacagatgagggaacagctcgaaatgctggaataccatcccgacgcgggaacgcagctttgccagatcggttttcttgtcattaaccacgataccatcgacggtgatttcaccttgctgcactggttcgaggccgttgacggttttaatcagcgttgatttgccggaaccagacgggccgcaaaccaccaccacttcgccttttttcacttcggttgagcagtcggtcagcacctgaaagtgaccataccattttgaaacatttttcagggtaatcattatgctgtccttcttttcaagtagctgaccaacaacgacgcgctaagactaataacgaaataaacaaatccggcaaacaggatcatctcaacctgcgtaccatcacgctcaccaatggttgaggcggtacggaagaaatcggccagagataacacatacaccagtgaggtatcctggaacagtacgatgccctgagtgagcagaagcggcaccatcgcgcggaacgcctgcggcagaataatcagtttcatcgactgccagtgagtcattcccaacgccagcgcggcgctcgactgaccacgagaaatactttgaataccagcacggataatctctgaatagtaggccgcttcaaacatcgaaaacgccaccatcgccgaaattaaacggatatcattttttggtgataatcccagcacgttttgcagaaaacctggcacgatcaggtaaaaccacagcaaaaccataactaaaggaatcgagcggaatacgttaacgtaggctttggcaaaccacgctacgggcgcaaagctggacaagcgcatcaccgccagcatggtgccccacaaaataccaatcacgactgccgtgacggtgattttcagcgtgatcaccagcccgtcgagcagatatggcagggaagggacaatggaactccagtcaaactcgtacattatttgccccccatgttgccaggcaggcgaactttacgttcaaccagcgtcattaccagcatgataaccgcgttaatcaacacatacgccagcgtaatagcggtaaacgactcccaggcgtgggctgagtaatcaagcaatttacccgcctgcgccgccatatccaccagaccaatagtcgaggcgatggcggagtttttcaccaggttcatcatctcggaagtcatcggcgggacgataacgcgataagcattaggcagcagtacgtatcgataagcctgcggtagcgtcaggcccatcgccagcgcggcatttttttgcccacgcggcaacgactgaatggcggcgcgtacctgttcgcaaacacgggcggcggtaaacagccccaggcagagcatggatgaaaggaaaaactgaatattgggatccagctcggccttaaaccacatgccgattttctccggcaacagctccgggatcaccagataccaggtaaagaattgcacaatcaacggcacgttgcggaacagttcgacatacaacgtacccagaccggagagaaaacggtttggaacggtacgtaaaatgccgaaaaatgaaccgacgaggaaagcgataatccaggcgcagatcgacaaagcgatcgtcacctgaaaaccactccagatccaaccaagataggtggtgttgccgaacggggcttgttgtaaaaaaataccccagttccagtctatagacataaatctactccagaaaaaagagggtagcagcgttaactgctaccctcgaagattgttacccagcgtattgcggttttcaggcccgatggggaacgaccatcaggcgtatagtctgtccgtgctacgtaacaatcgagagggctggaatttccgcccctggttcttgtaattagttcagtgccttgtcattcggttctttgaacagtgctttcatttcgtctgacagttcgaaattcatgttcaggtttttcggcggaatgggatttttgaaccatttatcaaaccatttttccgcttcaccggaggtctgcacctgcgcggtggtgtcatccatcagctttttgaactgcggatcgtctttacgcaacatgcaaccgtaggcttcctgagactgcggcttgccgacgatttcccagttgtctggtttcttcgctttcgcacgttcaccggccagcagggcatcatccatcataaaggcaacggcacgaccgctttccagggtgcggaaagagtcactgtgatctttggcgctgatgatgcgcatattcattttttgctcttcattcagtttgttgagcaaaacttcagaggtagtgccggaagtgacgactacggctttgtctttcaggtcggcaaaatctttgatatcgccgccctttttggtcagcaggcgcgtaccgaccacgaaaatagtatcagagaaagccgcctgtttttggcgttcgacgttgttggtggtagaaccacattcaaaatcgaaagtgccgttttgcagcagtggaatacggttttgtgaggtaatcggaatcagttttacctgcaagtccggtttgttgagtttctttttcactgcttcaacaatggcgttggagtaatcctgcgagtaacccaccactttttgctgattgtcgtaataagagaaaggtactgaagattcacggtgaccgacgacaatcacaccgtttttggcgattttgtccagcgtactgcctgctgccggggcggcgtcatctgcctgtgccagtcctgcggaaagcgccagggcgaggattgctgtggcaggtttacgtaattgcatatccaactcctttatcttctgcgttaagaacgcatggatacccgttgtgagtgtttgtgttgttatcgtctgcaactttattgtgcagtgttgtgcctgttaggtaacatttagtttggctaaatgtaaagatattgctgttttattgtttgtttttgcgagatgcgccgcaccattccgaagcaaaattcttaaaccgcacctttttggtgctaccgctgatttgtggtggtgcaacctggttgcgtcgcggctgatttcatcgcttacacagtaaataaagcaacttacatgccaaaaaatacttaggggcgaattaattacgattgtaattttaggctgaaaaagtcatatttcggacagaattatcttttcggcatgggacgtttgccgggatgataactgcacacgggaaaaatgctttttacctgtcttttcaaggaagaaacaccttatgtctgcatcttcggttaagccgttaaatgttcaattacccgcaataacccttatcctttttgcactctgtattgggatattttgttatctcgcacaatggatgagttatgaagaggtcgatcaatccgcacttatccatctcggcgcaaacgttgcgcctcttactttgtcgggtgaaccctggcgcttattgagcagtatctttctgcacagtagtgtttctcatctgctgatgaatatgtttgcattcctggtcgtgggaggcgtggcggaacagattctggggaaatggcgactcctgattacctggttattctccggcgtctttggtgggctcatcagcgcctgttatgcgttacgcgaaagtgagcagatagtcatcagcgttggggcatccggggcgattctgggaatagctggtgcagcgatagcaacacagtttgcttcaggtacgggcacataccataaaaaccagcggcgagtatttcctctgttgggtatggtggcgctgacactgttgtacggtgcccggcaaacaggaatagataacgcttgccacattggcggcctgattgcgggtggcgcgttgggttggctgagcgcgcgtttatctgggcaaaaccgactcgttacggaaggcgggattattgttgcgggcagtcttcttctgaccggggctatctggcttgcgcagcagcagatggatgagtcagttttacaggtcaggcaaagcctgcgtgaagcgttttatccacaggagattgaacaagagcgacggcaaaaaaagcagcagttagcggaggaacgcaacgccctcagggaaacattatccgctccggtaagtcgtgaacaggccagtggtgatttgctcgctgagattgccgatatccatgatatggcgatcagtcgggatggtaatatgttgtatgccgcaattgaaaacacgaacagcattgttgttttcgacctcggacaaaagaaaatcctgcatacctttacagcgcccatagcgaaagaaaagtcagtcaaacattgtggtggctgtaaagatcagggcgtcagatcgctggcattaagcccggatgaaaagttgatttatgcgacttcatttgaagcgaatgcgttatcggtcattaacgtggcgacaggggagattattcagtcgattaccaccggtgcacatcctgacagccttatcctctcgcgtgatggcacaaaagcctgggtgatgaatcgcaccagtaatagtgtgtcagcgattgatctggtgacttatcagcatgtggcggatatcccgctggagaaatacgacgggacggggacgagcggtaaaccaggcgcctgggttatggcactttccccggatgaaagaacattactggttccgggagcaggcagaggtaacatcgtgcggatcaataccatcacgcatcagaaagaagactttcccgcaggtgatgcgcgtggaacgatatcggcgatgcgttttcgacctgaaaacggcgaggttatttttgccgatagtcaggggatttcacgtataagcgtaggggatcaacaagccagcattatgacgcaatggtgtagcaggagcgtttattccgttgagggtattagcccggacggtcaatatttagcgttggtgtcatatggcctgcaaggttatgtcatcctgctcaatattaatgccgggcagattattggcgtttatcctgccagctacgttaatcaccttcgtttttcagcggatggtagaaaaatatttgtcatggcgaagaacgggttgatccaaatggacaggacgcgctcgcttgatccgcaggcaattattcgtcatccccaatatggcaatgtggcttgtatccctgaaccgtaagaaaaaggggcatgataaccatgccccaaagctcaatgagaaagtacgttttgctcatgcaggatacatcaggcacatcaacgtttacgtgctcgcagactcatcaacacagcggcaaaaccaaacagcgccgtcagcacccacagtggccagttgccggtacgtgcatacggtgtgagtccggtggtcggtgtcacattagtggtcaacacctcgcgggtgaactgcgggatcatcgcctgaacctccccctgcgggccaatcaccgccgtaatgccgttgttggtgctgcgcaacagtgggcgcgccagctccagcgcacgcattcgcgccatctggaagtgctgccatggaccaatagacttaccaaaccacgcatcgttggagatagtcagcagatagtcggtatccgggcggaagttatcgcgcacttgctcgccgagaatgatctcgtagcaaatagccgcagtaagctcaataccatttaccgacagcggcggctggatatatggcccacggctgaacgacgacatcggcagatcaaagaacggtgctaacggacgcagaatcgactccagcgggacaaactcgccaaacggcactagatggtttttgttatagcgatcggctgattcgtagctgtatggtgcacctttacccagtgtgatgatggtgttgtaggtatcgtagcggttctgcttattgagacgcgcgtcgacaatcccggttaccagcgagctacctttatcgcgcaactcaccgtccagtgctttgaggaacggttgctgattaatttccagatcggttatcgccgactccggccagataatcaacgatgatttgcccatcagcggagccgttgcgttgtagtaaatcttcagcgtattaagaagctgatctccatcccatttcagtgattgcggaatatcgccctgaaccatcgaaacctgaatggttttctccggttgcggggtaaaccattggatgtaacgcagcgggaagggtagggcaaacagcacgacggccaccaccagcggacgccagttgcgtttgaccaacgccagtgccagcaggccactaaccatcatcagcaggaagttaatggcttccacgcccattatcggtgccagcccttttaacgggccatcaatctggctatagccgaactgtaaccacgggaagcctgtcagtacccaaccgcgcagaaactcggtcacttgccagagagcaggggcggcaatcgccacgcgcagccaggtggttttcggccacagacgcgacagcacgccagcaaacagtccggtatacagcgacaaatacgccgccagcagcaccaccaggaagatgttaaccgggccaggcattccgccaaaggtcgcgatgctgacatagacccagttaataccgctgccaaagaggccaaatccccagcaaaagccaatagcggcagactggagtggacggcggttaaaggtcaacgcctgaagccccatcaacgaaataatcgccgcaggccagacgtcgtaaggagagaaggccagcgttccgcaggcaccgaataataacgccagcagcaggcgaatgcgctggcgttcaattaatgaggcaaaagccatgtagttatctatccagtttcggttttattcatccagcttcggctggggtgagtcatccgggattttgacatgaacctgaataatacgccgactgtcggccatcgccactttgaactggtaaccgtcgatgtcgatagtttcgccacgcgccggaagatgcccaaatgcctgcatcaccagaccaccgatagtgtcaacctcttcatcgctaaagtgggtgccgaacgcttcgttgaagtcttcaatggaagccagtgcacgcacggtccaggtatgacgactcagctgacggaagtcgatatcatcttcttcgtcatactcgtcttcaatctcaccaacaatcagttccaggatgtcttcaatggtcaccagaccggaaaccccaccgaattcgtcaatgacgatcgccatgtggtaacgctgagagcgaaactctttcagcatccggtctacgcgcttactttcaggaacgacaaccgcctgacgtaacactttgtccatgctgaaggcttcagcatcgctgcgcataaacggcagcaagtctttcgccatcagaatcccttcaatgtgatctttgtcttcgctaatcaccgggaaacgtgagtgggcggactcgatgatgacatcaaggcattcgtccagcgtctggttgcgtttcagggtaatcatctgggagcgggggatcatgatgtcgcgaacgcgttggtctgcgatgtccatcaccccttcgagcatatcgcgcgtatcttcgtcgataaggtcgttctgcccggaatcacggatcagcgccagcagttcgtcacggtttttcggttcaccgtggaaaagttggctgagtaacagggagaaaaatcccttcttgttgcttatcgtgtcactactgtgtgaattgtcgtcgctcatggcgtcgtatgggttctcatgttagttaatcaaaacgccgtcgttaatcaccaacggcggggacgtctgccagtcaaatgcctggcaaattattctttctcggcaatgtacggatcctcatagcccagagcaagcataatctctgtttcgagggcttccatttcttctgcttcgtcatcttcgatgtgatcgtaacctaacaaatgcagactgccgtgcaccaccatatgcgcccagtgcgcctccagtggtttgccttgctcctgagcttccttctcaaccacctgacggcagataaccagatcgcccagtagcgacatttccatgccaggcggcacttcaaacgggaaggagagcacgttggtcggcttatccttaccgcgataggtcagattcagactgtggctttcggcggtatcgaccacgcgaatagtcacttccgattcttcctgaaactgcgggatcaccgcattcagccatgtttgaaactggctctcttccggtaacccggaattatcttcacatgccagttgtaaatcgaggatcacctgactcatttttgttcctgttcttcgcgcttgcgttctgccgccagcgccgcttttcgtttttgttcggcttcttcccaggcttcataggcgttaacgatacgcgccaccacagggtgacgaaccacgtcttcgctgtggaagaagttaaagctgatctcttcgacatcggccagcacttcgatggcgtgacgtaagcctgatttagtattacgcggcaggtcgatctgtgtgacgtcgccggtgataaccgcttttgagttaaaaccgatacgggtcaggaacatcttcatctgttcgatggtggtgttctggctctcatcgagaatgataaacgcgtcgttcagcgtacgaccacgcatataggccagcggcgcgacttcaataacgttgcgctcaatcagtttctcaactttctcaaagcccagcatttcaaacagcgcgtcgtacagtgggcgcagatacgggtctactttctggcttaaatcgccaggcaggaagcccagtttctcaccggcttcgaccgccggacgagtcagcagaatacggcgaatctcctgacgctccagggcatcaactgccgcagccactgccaggtaggttttacccgtacccgccgggccaacgccgaaggtaatgtcatggtcgagaatattggcgatgtactgcgcctggtttggcgtgcgcggcttaattacgccgcgtttggttttgatattgaccgctttgccgtactccggcacgctctccgcactttgctccagtactcgcgcttctttaatcgcaaggtggatctgttccggttcgatatcctgaatctgaccgcgcatcggggctgtatcgacatacaggctacgcagaatgtctgccgcagcggtgacgcaaatcggacggccggtcagtttaaagtggttgtcgcggcgattgatctcgatgccgagacggcgttcgagctgcttgatgttgtcatcaaacgggccgcacaggctcaacagacgcgcgttgtctgctggctccagggtgatttcgcgagtgtctatgttcaaaccgttcctcttatctgtatgccgccggaagctgaacattcaccggcctataaggaaattattcacgccacaggaaaaaggcgcaagcattgcgataaagatggggataaagagagaaaaaacaaggcccaccggaacggcgggcctgagaattacggctgataataacccacgccaaggtcgttttctttgcgggtacgggcaatcaccgattccggtgtttctgccacgcgcagacccatttcatcttcagtacgcaccactttaccgcgcagagagttcgggtagacgtcggtaatttctacatcgacgaatttaccgatcatatccggtgtgccctcgaagttgaccacgcggttattttcggtacgcccggaaagctccatgatgctcttacgcgaagtcccttctaccagaatacgctgggtggtgccgagcatccggcggctccatgccatcgcttgctgattgatacgttcttgcagaatatacagacgttgcttcttctcttcttccggaacatcatcaaccatatcggcggctggtgtacccggacgtgcagagaagataaagctgtagctcatgtcgaaattgacgtcggcaatcagcttcatcgttttctcgaagtcttcggtggtttcgccagggaagccaacaatgaagtcagaactgatctgaatatccggacgcgccgcacgcagtttacggatgatcgctttgtactccagcgccgtgtgagtacggcccatcaggttcagaatgcgatcggaaccgctttgtaccggcagatgcaggaagctcaccagctccggcgtgtcgcgatacacttcgatgatatcgtcggtgaattcgatcggatggctggtggtaaagcgaatacgatcgatcccgtcgatcgcagcaaccagacgcagcagatcggcaaacgatccggtggagccgtcgtagttttcaccacgccaggcgttcacgttctgaccgagcaggttgacttcacgcacgccctgagccgcaagctgggcaatctcaaacagaatatcgtcagacggacggcttacctcttcaccacgggtgtaaggcaccacgcagtaggtgcaatatttattgcagccttccatgatggagacaaacgcggtcggcccttcggcgcgcggttccggtagacggtcaaacttctcgatttccgggaagctgatatctacaaccgggctgcggtcgccgcgcacggagttgatcatctccggcagacggtgcagcgtttgcggcccaaaaataatatcgacatagtgggcgcgctggcgaatgtgctcgccttcttgcgatgccacgcagccaccgacgccgataatcaggtctggattcttctcttttaacagtttccagcgacccaactgatggaagactttttcctgagccttctcgcggattgagcaggtgttcagcagcagcacatccgcttcttccgccacgtcggtcagttgatagccgtgggtggcatccagcagatcggccatcttcgatgaatcgtactcgttcatctgacagccccaggttttaatatggagttttttggtcatcgacttgctcttgcgaaatagtagccaggaatgcagggcgtatagtgtaatgctttgctgccgttgtgaccagtatgagcgttatcagcccttgggggtaaaaatcctgtaaacttaaagcatattgctaacaggatgattgaccatgacaaatcaaccaacggaaattgccattgtcggcggaggaatggtcggcggcgcgctggcgctggggctggcacagcacggattttcggtaacggtgatcgagcacgcagaacctgcaccgtttgtcgctgatagccaaccggacgtgcggatctcggcgatcagcgccgcatcggtatcattgcttaaagggttaggggtctgggatgcagtacaggctatgcgttgccatccttaccgcagactggaaacgtgggagtgggaaacggcgcatgtggtgtttgacgccgctgaacttaagctaccgttgcttggctatatggtggaaaacaccgtcctgcaacaggcgctgtggcaggcgctggaagcgcatccgaaagtaacgttacgtgtgccaggctcgctgattgcattacatcgagataatgatcttcaggagctggaactgaagggcggtgaaacgatccgcgcgaaactggtgattggtgccgacggcgcaaattctcaggtgcggcagatggcgggaattggcgttcatgcctggcagtatgcgcagtcgtgcatgttgattagcgtacagtgtgagaacgatcccggcgacagcacctggcagcaatttaccccggacggaccgcgtgcgtttctgccgttgtttgataactgggcatcgctggtgtggtatgactctccggcgcgtattcgccagttgcagaatatgaatatggcgcaattccaggcggaaatcgcgaagcatttcccgtcgcgtctgggttacgttacaccgcttgccgctggtgcgtttccgctgacgcgccgacatgcgttgcagtatgtgcagccggggcttgcgctggtgggcgatgccgcgcataccatccatccgctggcggggcagggggtgaatcttggttatcgtgatgtcgatgccctgattgatgttctggtgaatgcccgcagctacggtgaagcgtgggccagttatcctgtcctcaagcgttaccagatgcggcgcatggcggataacttcattatgcaaagtggtatggatctgttttatgccggattcagtaataatctgccgccgctgcgttttgtgcgtaatctcgggttaatggcggcagagcgtgctggcgtgttgaaacgtcaggcgctgaaatatgcgttagggttgtagccttacaacattgccggatgcgtgccaaccgtaggtcggataagacgcggcagcgtcgcatccgacattgaaggataagacgtgtcaacatcgcattcgacattgaatgaacgcagaaaagcaaaaaactcgccgaagcgagcttttttaatgtggctggggtacgaggattcgaacctcggaatgccggaatcagaatccggtgccttaccgcttggcgataccccaactggtgcacttacgatgtaagcgtcttgaataaattggctggggtacgaggattcgaacctcggaatgccggaatcagaatccggtgccttaccgcttggcgataccccaacaaattggtttttgaatttgccgaacgtattcgacacattcagaatttggtggctacgacgggattcgaacctgtgaccccatcattatgagtgatgtgctctaaccaactgagctacgtagccagattgtttcttcgatggctggggtacctggattcgaaccagggaatgccggtatcaaaaaccggtgccttaccgcttggcgataccccaataaccggtcggtgaaccgcttactcgaagaagatggctggggtacctggattcgaaccagggaatgccggtatcaaaaaccggtgccttaccgcttggcgataccccatccgtacaacgctttctggtgaatggtgcgggaggcgagacttgaactcgcacaccttgcggcgccagaacctaaatctggtgcgtctaccaatttcgccactcccgcaaaaaagatggtggctacgacgggattcgaacctgtgaccccatcattatgagtgatgtgctctaaccaactgagctacgtagccatctttttttcgcgataccttatcggcgttgcggggcgcattatgcgtatagagccttgcagcgtcaacctctttttcaaggaaaattgctcgaaagtgactgtttggttaggttgcgaacagcgtggcgctatattcgtcaattattgtttactttgtgttttttccccaccctacagccattcttttgtcatacaggatgaaattcggaattcaacaatggtggtgggaaattaatctatgaaatactggcctacagtgatgagttgtcaaacagtgatgtggcaaacccggaacatttccttactgcatatcagaatcaacaagcacctcaataactgaaacagccccggatttcaccggggctgtttcgcatttcttacttatacgccgactggtgaacgccaaccgcacgaccagacggatcgtccattttcttgaacgcctcatcccactcaatcgctttagcggaagaacacgcgacggacgggccgcccggcacgcactcagcggcgctcggaagcgggaacagttcttcaaagatctcccggtacagatacgcttcttttgaggttggcgtgttgtacgggaagcggaagcgggcagtttccagttgctgatcagaaacctgctgcgccgccacttctttcagggtgtcgatccaactgtaaccgacgccatcggagaactgctctttctgccgccaggccacgcttgcgggcaggtatgactcaaaacattcacgcaggatgtgtttttccattttgccgttaccgcacattttatcctgcgggttaatgcgcatcgccacatcaaggaattttttgtcgaggaacggaacgcgtgcttccacgccccaggctgacatcgctttgttggcgcgcgcgcagtcatacatatgcagggccagcagtttacgcaccgtctcttcatgcagttctttagcgttgggcgctttatggaagtaaagataaccgccaaacacttcatcagaaccttcaccggacagcaccattttaatgcccatcgccttgatcttacgcgacattaaatacatcggtgttgaagcgcgaatagtggtcacatcataagtttcgatgtggtaaatcacgtcgcggatggcatccagaccttcctgtacagtgaagtgaatttcgtgatgcaccgtgcccagatggtttgccacttcctgggctgctttaagatccggtgaacccggcagacctacagcaaaggagtgtaactggggccaccaggcttcagagcgttcctgatcttccacgcgacgggctgcgtatttcttggtgatagcggaaataattgaggaatccagaccaccagaaagcagcacaccgtaaggcacatcagacatcagatggcttttaacggaatcttccagagcctgacgcagctcgtttttgtcggtcacgttatctttcactgcatcaaagtcgaaccagtcgcgatgataataagaacggatttcgccgtcctggctccacaaatagctccccgccgggaactctttaatcgtgcggcaaactggcaccagcgatttcatttctgaggccacatacagctgaccgtgttcgtcataccccatatacagtgggatgatccccagatggtcgcgaccaatcaggtaggcatctttttcgctgtcgtacagggcaaaggcaaacatgccctgcaagtcgtcgagaaattccggccctttttcctgatacagcgcgaggatcacttcacagtcagaccctgtctggaactgataacgatcgccatattcagcgcgcaatgcctggtggttgtagatttcaccgtttaccgccagtacgtgggttttttgttggttgtagagaggttgcgcccccgcgttaacgtcaacaattgacagacgttcgtgagcgagaatggcgttatcgctggcataaataccggaccagtccgggccacgatgacgcatcaggcgtgacagctcgagtgctttcttacgctgctcaactgcgtctgttttgatatcgaatacgccaaaaattgaacacataaccttctccgttaacctggtatttgttgcttgttgtgtttgcttgtttaaaaaaatgccgcaaagcagcactgtgcgcaagcgatttggcggtgaaaaaataaaaaacgtaatggtgattgtcgattggtgaaaaaggggctggtgtgaggatgtatttattgatgaatcgataatttttagcgggttttattgaatggttatattttacgggggccaggtgatgctgccaacttactgatttagtgtatgatggtgtttttgaggtgctccagtggcttctgtttctatcagctgtccctcctgttcagctactgacggggtggtgcgtaacggcaaaagcactgccggacatcagcgctatctctgctctcactgccgtaaaacatggcaactgcagttcacttacaccgcttctcaacccggtacgcaccagaaaatcattgatatggccatgaatggcgttggatgccgggcaactgcacgcattatgggcgttggcctcaacacgattttacgtcacttaaaaaactcaggccgcggtcggtaacctcgcgcatacagccgggcagtgacgtcatcgtctgcgcggaaatggacgaacagtggggctatgtcggggctaaatcgcgccagcgctggctgttttacgcgtatgacagtctccggaagacggttgttgcgcacgtattcggtgaacgcactatggcgacgctggggcgtcttatgagcctgctgtcaccctttgacgtggtgatatggatgacggatggctggccgctgtatgaatcccgcctgaagggaaagctgcacgtaatcagcaagcgatatacgcagcgaattgagcggcataacctgaatctgaggcagcacctggcacggctgggacggaagtcgctgtcgttctcaaaatcggtggagctgcatgacaaagtcatcgggcattatctgaacataaaacactatcaataagttggagtcattacccgggggccaaattgctgataaagtgcgatttgttcatgccggatgcggcgtgaacgccttatccggcctacaaaagcatgaaaattcaatatattgcaggagctgcgtaggcctgataagcgtagcgcatcaggcagtttggcgtttgtcatcagagccaaccacgtccgcagacgtgggtggtattcagataacgtcgatttcagcgactgacgggtaaatccagcttgggcggaacggcatactgtcgatatcgtcgagcgatgaaacaccagaaagcaccagaatcgtttccagacctgcctggaagcccgccagaatgtcggtgcgcaagttatcgccgacaatcaccgtttcttccgaatgcgcctgcattttgtttaatgctgcgcggatgatccacgggctgggcttaccaacatagaacggtttgcgcccggagattttctcaatccctgcacacaacgcgccacaagcgggataaaaaccgcgcccgtgggtgtccgggttggtggcgataaagcgtgcaccgttagcgacgaaataggccgctttatgcatcatgtcccagttgtaggaacgcgtttcgccaacaatcacgaaatcagggttcacatcggtaatagtgaaaccggctttgtacagttcatgaatcagtgcgccttcgcccaccacatatgctttcttgccttcctggcgacgcaggaaatcggcggtcgccatcgcagaggtataaaacacgctatccggcacatcgacaccggcagtggcaaagcggttcgccagatcttgcccggtctgcgaaggatagttggtcagcaacaccagcggcaggcctttatccataatcccgtgcaaaaattccgctgcacccggtacggcgacgttatcgtgcatcagcacgccgtcgatatcgcaaattacatttttaatggtcatggactacccagaatattgacaacaataagcgccactataaaagcacattaattttccagcaaatgctggagcaaaataccgttgagcatggcgcgttttaccagcgcaaaagcgccgattgccgagcggtgatccagctcagaacgtaccaccggcagattagtacgaaacgccttcagcgcctgggtattaatgcagctttcaatagcagggagcagcactttatcggcttcggtgatttcaccggcaataacaattttttgcggattaaataagttgatagcaatggcgatggttttacccagatgacgaccgacatactcaattacttccgacgccagactatcgcctttgttcgcggctttgcagatagttttgatggtgcagtcgtccagcggcacgcggctctggtagccctgctttaacagattcaacacccgttgttcaatggcagcgttggcggcgatagtttccaggcagccaaagttgccgcagtggcagcgttcacccagcggttcgacctgaatatggccaatttcaccgacgttaccgttgcggccaataaaaatgcgcccgttagagataatcccggccccggttccgcgatggacacgcaccagaatggagtcttcgcaatcctgacttgcaccgaagtagtgctccgccagcgccagactacggatatcgtgaccaacgaaacaggtcactttaaaacgttcttccagagcttctaccagcccccagttttctacctgaatatgcggcatgtaatgaattttgccgctgtccgggtcaacaagccctggcaggatcaccgaaatcgcgatcagctcgcgcagtttgcgctggtagctatcaataaactgagcaatggcattcaacagggcatgttccagcgtttgctgggtacgttccggcagcgggtaatgttcttctgccagcactttgctgctgagatcaaacagggtgatggtggcgtcgtgacgaccaagccgtacgccgattgcgtggaaattgcgggtttcggtgacgatggagatagcgcggcggcccccggtggaggcctgctgatcaacttctttgatcagcccgcgttcgataagctgacgcgtaattttggttacgctggcgggggcaagctggctttgctcggcaatctgaatccgcgagattggcccgtactggtcaatcaggcgataaaccgccgcgctgttaagctgttttacgagatcaacattacctatctgagcttgtccgcctggtgtcatactttctcttattgagttacgacctcgttaccgttaacgatggtcttggtgattttaaaatcaggtgtgaatgaggtcaggttggctactttacctgcggcgagtgtgccgagacgtttctcaacgccaatcgcacgcgccggatagagcgtcgccatacgcagcacttcatccagtgcgataccgcaatgttcgaccagattacgcacgccttcaatcatggttaaggatgaaccgcttaacgtaccgttctcatccacacaaagtccgttacggtagtatattgttttacccgcaaaaatgaactgttcaatgttggcacctgctggcgcggtggcgtcggtaaccagacacagtttgtcgcctttaaggcgtttagcgttacgaatgttggcgtaatcaacatgcaggccatcagcgataataccgcaataaatgtcagcttcgtcgaggatcgcgcccgccaggcccggttcacgaccggtaatatacggcatcgcgttgtacagatgggtggcaaaggtaatccccgcgcggaaaccggctttcgcttctttcaacgtcgcgttggagtgaccggcagaaaccacaatcccggcatttgccagtttgctgatgacttccgcaggaaccatttccggtgccagggtcactttggtaatgacgtcggcgttttcacacaggaaatcgaccagcgcggcatcaggcttacgcacaaaattcggattatgggtgcctttttttaccagattcagccacggaccttccagatgcagacctaacgcctgattcggatgtcttgccaggtactcgcgcataacgcgcacgccctgtttcatcagctcatcgctggtggtgataagcgtcggcagatagttagtacagcctgatttctcattggctttctgcatgatttccagcgtttccacgctgaccgcttcagcggtgtcgttaaactgtacgccgccgcagccgtttaactgcacatcgataaaaccgggggagagaatggccccgttcagtgaacgttgttcgatctctggcggcagttccgctaccggacagacgcttttaatcaggccatcagcgataacaaccgcgtggtcatcaagaaattcgtggccggtaaagatccggccctgggttaatgcatacattctgccccccgattttaaaaaatattgccctgagcaaggagccagggcagggataacaattacagacctttgatattttctgcttctaattcattgaaatatcttaaagtcttaactttcagctccatggtggaaggttcatcgcacaccatgatcgcttttggatgcagttgcagacagctgatggtccacatgtggttcacgcaaccttcaactgcagcctgcagtgccagtgctttctggctacccagcaccagaatcatcacttcttcggcatccagcaatgtaccaacaccgacagtcagggcatattttggcacctgattgacatcgttatcaaagaaacgagagttcgcgacgcgagtgtcatgagtcagggttttgatacgagtacgagaagccagagaagacgccggttcgttaaatgcaatatgaccgtcgttacctacaccgcccataaacagatgaatttttccgtaagaacggattttttcttcatactggcggcattcggcgtcgatatccggggcgttgccgttgagaaggttgatgttttctgctggaatatcaacgtgatcgaagaaattacggtgcataaagctgtagtagctttccggatgctctttcggcagaccgacatattcgtccatgttgaaggtgacaacgtgcttaaagctgacctggcctgctttatgcatttcgactaacgctttataggtggtcatcggcgtgccgccagtcggcaggcccagaacaaacggacgatcggcagtcggtttgaacgcattgatacgattgacgatatggcgagcagcccatttgccgacctgttcagcggtagttagggggatcagtctcattattcacctcaataagtaaaatgtaagccgttggcggattaggcatctttaagcgtaacctggatttgcgcagacaggcgtcaatccgacctgattttttgaatgataaaataagttttctgctttagccagtaaaagggagtgatgataacgatatttggtgacaaaactcacaaaaggcacgcgtttaatttgcgatacgaattaaattttcacacactctgtagcagatgatctaacaatctgattacagaacatcggcagtacaatttgcagcaaaataaaaatacggctttaaacgagccaaatagggttctcgtagggggaataagatgaatattttaggttttttccagcgactcggtagggcgttacagctccctatcgcggtgctgccggtggcggcactgttgctgcgattcggtcagccagatttacttaacgttgcgtttattgcccaggcgggcggtgcgatttttgataacctcgcattaatcttcgccatcggtgtggcatccagctggtcgaaagacagcgcaggtgcggcggcgctggcgggtgcggtaggttactttgtgttaaccaaagcgatggtgaccatcaacccagaaattaacatgggtgtactggcgggtatcattaccggtctggttggtggcgcagcctataaccgttggtccgatattaaactgccggacttcctgagcttcttcggcggcaaacgctttgtgccgattgccaccggcttcttctgcctggtgctggcggccatttttggttacgtctggccgccagtacagcacgctatccatgcaggcggcgagtggatcgtttctgcaggcgcgctgggttccggtatctttggtttcatcaaccgtctgctgatcccaaccggtctgcatcaggtgctgaacaccatcgcctggttccagattggtgaattcaccaacgcggcgggtacggttttccacggcgacatcaaccgtttctacgctggtgacggcaccgcggggatgttcatgtccggcttcttcccgatcatgatgttcggtctgccgggtgcggcgctggcgatgtacttcgcagcaccgaaagagcgtcgtccgatggttggcgggatgctgctttctgttgctgttactgcgttcctgaccggtgtgactgagccgctggaattcctgttcatgttccttgctccgctgctgtacctcctgcacgcactgctgaccggtatcagcctgtttgtggcaacgctgctgggtatccatgctggcttctctttctctgcgggggctatcgactacgcgttgatgtataacctgccggccgccagccagaacgtctggatgctgctggtgatgggtgttgtcttcttcgctatctacttcgtggtgttcagtttggttatccgcatgttcaacctgaaaacgccgggtcgtgaagataaagaagacgagatcgtaactgaagaggctaacagcaatactgaagaaggtctgactcaactggcaaccaactatattgctgcggttggcggtactgacaacctgaaagcgattgacgcctgtattacccgtctgcgccttaccgtggctgactcagctcgcgtcaacgatgcgatgtgtaaacgtctgggtgcttctggtgtagtaaaactgaacaaacagaccattcaggtgattgttggcgcgaaagcagaatccattggcgatgcgatgaagaaagtcgttgcccgtggcccggtagcagctgcgtcagctgaagcaactccggcaactgccgctcctgtagcaaaaccgcaggctgtaccaaacgcggtatctatcgcggagctggtatcgccgattaccggtgatgtcgtggcactggatcaggtttctgacgaagcattcgccagcaaagcggtgggtgacggtgtggcggtgaaaccgacagataaaatcgtcgtatcaccagccgcagggacaatcgtgaaaatcttcaacaccaaccacgcgttctgcctagaaaccgaaaaaggcgcggagattgtcgtccacatgggtatcgacaccgtagcgctggaaggtaaaggctttaaacgtctggtggaagagggcgcgcaggtgagcgcagggcaaccgattctggaaatggatctggattacctgaacgctaacgcccgttcgatgattagcccggtggtttgcagcaatatcgacgatttcagtggcttgatcattaaagctcagggcaatgttgtggcgggtcaaacaccgctgtatgaaatcaaaaagtaatctgctttatgcctgatgcgacgcttgacgcgtcttatcaggcctacaaaagctcagtcctggttggataagacgcgcatccaacaatgacgcgggactggcaaaagcggtggagatcttctctgccgctttttttttcatcaatcatccccataatctcagtgagattttcgattttcgctaactaacagttgtcagcctgtcccgcttataagatcatacgccgttatacgttgtttacgctttgaggaatccacgatgagtgaggcagaagcccgcccgactaactttatccgtcagatcatcgatgaagatctggccagtggtaagcacaccacagtacacacccgtttcccgccggagccgaatggctatctgcatattggccatgcgaaatctatctgcctgaacttcgggatcgcccaggactataaaggccagtgcaacctgcgtttcgacgacactaacccggtaaaagaagatatcgagtatgttgagtcgatcaaaaacgacgtagagtggttaggttttcactggtctggtaacgtccgttactcctccgattattttgatcagctccacgcctatgcgatcgaactgatcaataaaggcctggcgtacgttgatgaactgacgccggaacagatccgcgaataccgcggcaccctgacgcaaccgggtaaaaacagcccgtaccgcgaccgcagcgttgaagagaacctggcgctgttcgaaaaaatgcgtgccggtggttttgaagaaggtaaagcctgcctgcgtgcgaaaatcgacatggcttcaccgtttatcgtgatgcgcgatccggtgctgtaccgcattaaatttgctgaacaccaccagactggcaacaagtggtgcatctacccgatgtacgacttcacccactgcatcagcgatgccctggaaggtattacgcactctctgtgtacgcttgagttccaggacaaccgtcgcctgtacgactgggtgctggacaacatcaccattcctgttcacccgcgccagtacgaattctcgcgcctgaatctggaatacactgtgatgtccaagcgtaagctgaacctgctggtgaccgacaagcacgttgaaggctgggatgacccgcgtatgccgaccatttccggtctgcgtcgtcgtggttacactgctgcttctattcgtgagttctgcaaacgcatcggcgtgaccaagcaggacaacaccattgagatggcgtcgctggaatcctgcatccgtgaagatctcaacgaaaacgccccgcgcgcaatggcggttatcgatccggtgaaactggttatcgaaaactatcagggcgaaggcgaaatggttaccatgccgaaccatccgaacaaaccggaaatgggtagccgccaggtgccgtttagcggtgagatttggatcgatcgcgccgatttccgcgaagaagctaacaagcagtacaaacgtctggtgctgggtaaagaagtgcgtctgcgtaatgcttacgtcattaaggcagaacgcgtggagaaagatgccgaaggcaatatcaccaccatcttctgtacttatgacgccgacaccttaagcaaagatccggcagatggtcgtaaagtcaaaggtgttattcactgggtgagcgcggcacatgcgctgccggttgaaatccgtctgtacgaccgtctgttcagcgtgccgaaccctggtgctgcggatgatttcctgtcggtgattaacccggaatcgctggtgatcaaacagggctttgctgaaccgtcgctgaaagatgcggttgcgggtaaagcattccagtttgagcgtgaaggttacttctgcctcgatagccgccattctacggcggaaaaaccggtatttaaccgcaccgttgggctgcgtgatacctgggcgaaagtaggcgagtaattttaagtttcgctatgccggatggggcgtttacgtcgcatccggcaaggaacagacaaacagtttcaaacgctaaattgcctgatgcactacgcttatcaggcctacatgatctctgcaatatattgagtttgcgtgcttttgtaggccggttaaggcgttcacgccgcatccggcaagaaatatgcaaacaatccaaaacgccgcgttcagcggcgttttttctgcttttcttcgcgaattaattccgcttcgcaatttatccataaaataaatttaaaataacaaaacataattaaataaaatgtaaccgctttcatcttgctggaatttcacgcttttattcttctgcaagcctttcaaccgcaaacttaagccttgtaacaaaaatcatcaaaatatgtgcggttgctcatgttcttacattctggttacagaaagagattgataattcgcgtcgcgaaaaatagtctgttcctgtagtcagcgagacttttctcaacgctacttttttaatttttattttttcgctgttcacctttggtgcagcaatttatacgtcaaagaggattaacccatgcgtacgtttagtggcaaacatagtacgctggcgctggctatcgccggtgttacagcaatgtcgggctttatggcaatgccggaggctcgcgccgaaggattcatcgacgattcaaccttaaccggcggtatatattactggcagcgtgaacgcgaccgtaaagatgttaccgacggcgacaaatacaaaaccaacctttctcactccacctggaatgccaacctcgattttcagtccggttatgctgctgatatgttcggccttgatattgctgcgtttacggcgattgaaatggcggaaaacggcgacagctcccacccgaacgaaatcgcgttttcaaaaagtaataaagcctatgacgaagactggtccggcgacaaaagcggtataagcctgtataaagctgcggccaaatttaaatacggtccggtttgggcgagggcaggttacattcagccaactggtcaaacgctgttagcgccgcactggagctttatgccaggtacttatcagggggcggaagccggggcgaattttgattacggcgatgctggtgcgttgagtttctcctacatgtggaccaacgaatacaaagcgccgtggcatctggaaatggatgagttttatcagaacgataaaaccaccaaagttgattatctgcactcccttggggcgaaatacgacttcaaaaataacttcgtactggaagcggcatttggtcaggcggaagggtatatcgatcaatattttgccaaagccagctacaaatttgatatcgccggtagcccgttaaccaccagctaccagttctatggtacgcgcgataaagttgacgatcgcagcgtcaacgacctttatgacggcaccgcctggctgcaagcgttgacctttggttaccgggcggctgacgtagtggatttgcgcctcgaaggcacctgggttaaggctgacggtcagcagggatacttcctgcaacgtatgactccaacctacgcttcctccaacggccgcctggatatctggtgggataaccgttccgacttcaacgctaacggcgaaaaagcggtcttcttcggtgcgatgtatgacctgaaaaactggaatcttccaggcttcgccatcggcgcttcctacgtttacgcatgggatgctaaacctgcgacctagcagagcaatccggatgcgtactacgacaaaaaccggactattgaagagtctgcatacagcctggatgcggtctacaccattcaggacggtcgcgccaaaggcacgatgttcaaactgcacttcaccgaatacgacaaccactccgacatcccaagctggggcggtggttacggcaacatcttccaggatgagcgtgacgtgaaatttatggtaatcgcaccattcaccatcttctgatgcccgacgcggcaggttttgtgcctgccgcacgtttgaggaatttgctatgaaaaaactgattctcatcgccataatggcatcggggctggtagcttgtgcgcaatcaaccgcgccacaggaagacagtcgtctgaaagaggcatacagcgcctgtatcaacaccgcacaaggttcgccagaaaaaattgaagcctgccagagcgtgttaaacgtgctgaagaaagagaaacaacatcagcattttgccgaccaggaaagtgtccgcgtactggattatcagcagtgtctgcgtgcaacgcaaaccggaaatgatcaggcggtgaaagccgattgtgataaagtttggcaggaaattcgcagtaataacaaataagtgagagctgtaactctcgcttttcttatttcccttgcataaaaaagccaacccgcaggttggctttttctcattcaggctggcttatttgccttcgtgcgcatgttcatcttcgcggcaatcgccttcggcacagtgaccgtaaagatagagactgtggttagtcaggcgaatgccatgttttgcggcaatttcacgctgacgcgcttcgatggaatcatcactaaattcgataaccttgccgcagtcgaggcagatcaggtgatcgtggtgatgttgctgtgtcagttcaaatacggatttaccgccttcaaaattgtggcgggtgacgataccagcgtcgtcaaactggttcagtacgcgatataccgtagccagaccaatttcttcacccatatcgatcagacgtttgtataaatcttccgcactgacgtgatggttgtccggctcctgaagaacttctaggatttttaaacgaggaagcgttactttcaggccagctttctttagggcggtattgttatcagtcatgcggaatctgtcctgttactaagcggttcacttcattagaagaagtgacagaatttgctcttgagataatgcgtatcattatagaattgccacgcctaaatgaaaaccacaagtccctggcaaatattgttaataaaaacgtggcacagcttacatttacaacggcaaggccacttgaacaccgggacattgtacaggtacaacagcaaaagttacaaatttgtagcaattattttgattggcattatctattaatacggcgtagacatgagtctacgccgcatcacatcaggcattgagaatttcgtcgagatgcaactcttcagaaatctgtttaacccatttttctacacgttcagcggtcagttccggctgacggtcttcgtcgatagccagaccgacaaagtggtcgtcatcagccagaccttttgatgcttcgaaatgatagcccgcagttggccagtgaccaacgatcgttgcaccgcgcggttcaatgatgtcgcggatggtgcccaatgcgtcgcagaaatattcggcgtaatcttcctggtcaccacaaccaaacagcgcaaccagtttgccgttgaaatcaatctcttcgagagtcgggaagaagtcatcccagtcacactgcgcttcgccataataccaggttgggatgcccagcagcagaatgtcataagcttccagatcttctttgctgctttttgcaatgtcatggacatcggcaacgtctttaccaagctgtttttgaatcatttttgcgatattttcggtattaccggtgtcgctgccgaaaaagatgccagtgatagccatgagtgaaataacctcttgaaacttattgaaatgggggtggaaaattgcccacggataaaggcaatcatagcagaacaggcagtcttgcggaatcagcaaacgagcaggactgcacactgtgctacatgaaagtggaaatttaaacgatgccctgactacgcagcgccgccagttgctgcattaacatctcttcgatcagttcgctacggctcatattgcgcgactccgccagctcgttcagcgcctcgacagcttccgcgttcagcttcagttcgacacgcttaaggccacgtactttgtcgcgttttagctggttgcgtttattaatacgcagctgttcatcgcgcgaaagcggattagttttcggtcgtcccggtcgacgctcgtgcgcgaacagatctaatgtcgtacggtccgtttgttctttggccatgatcttggtgacttcgggggaaacaatcagccaggcctctgcccggatggatagcgcgccataatacatcagcgcgatgagtcacgccaacgcccacgcgcggaaagcgacgcggacgctgggtttttaatcagttgcgttaatcattgagatagcgacggatagcgcgtaataccgcatccggtttttcagcatggacccagtgacccgcgcctgcaatcacatgcgcccgtgcctgtggaaattgtgccagtaaatcatcacggtactgctcgctaacatacggagaattgccgccagggataaacagggcagggtgatcccatgccgggattttctcccaacccacaatatgcggatactgatcccacaataccggcacgttaaagcgccactccccgtcaacaaaagatttcaacagaaactgaatcaccccttcttcattaagatgctggtgcattattgctgctgcttgctggcgagtttgtgcgtccgattcactgaccgcgttgatagccgcgaaaatctcatcatgacggcgtacgtgatagtcgaccggtgcgatatcgatcgccaccagtttatcgatgcgatcgcgggccagtgccgtaagtgccattaccgctttaccgcccatggagtgaccgataaatgttgctttgtcgatctgctgtgcatccagagtatcaacaagatcctgcgccatcgccgggtaattcattaccggatctctcggtgaaagaccgtggttacgcatatcaacctggatgatattgtgatcgtttaccagatcgcgagccagtacgccaaggttgtcgaggctaccaaacagaccatggacaagaacgatgggagaattattgtgctggttttgtgcagtttgcgcgcggatattcaatttcatggcaaagttctttttttcgcgttgtcgggttagggtattatgttgaccattgtgccacagggctgcaacaaataaggtttattccgagtttttctgcaagccaggcttgacgctatccgctgccgggatttattcatatactcttggcgacttgtattcagctaagacactgtactggattaagatgaaaacgattgaagttgatgatgaactctacagctatattgccagccacactaagcatatcggcgagagcgcatccgacattttacggcgtatgttgaaattttccgccgcatcacagcctgctgctccggtgacgaaagaggttcgcgttgcgtcacctgctatcgtcgaagcgaagccggtcaaaacgattaaagacaaggttcgcgcaatgcgtgaacttctgctttctgacgaatacgcagagcaaaagcgagcggtcaatcgctttatgctgctgttgtctacactatattctcttgacgcccaggcgtttgccgaagcaacggaatcgttgcacggtcgtacacgcgtttactttgcggcagatgaacaaacgctgctgaaaaatggtaatcagaccaagccgaaacatgtgccaggcacgccgtattgggtgatcaccaacaccaacaccggccgtaaatgcagcatgatcgaacacatcatgcagtcgatgcaattcccggcggaattgattgagaaggtttgcggaactatctaaaacgttgcagacaaaggacaaagcaatggcaatccacaatcgtgcaggccaacctgcacaacagagtgatttgattaacgtcgcccaactgacggcgcaatattatgtactgaaaccagaagcagggaatgcggagcacgcggtgaaattcggtacttccggtcaccgtggcagtgcagcgcgccacagctttaacgagccgcacattctggcgatcgctcaggcaattgctgaagaacgtgcgaaaaacggcatcactggcccttgctatgtgggtaaagatactcacgccctgtccgagcctgcgttcatttccgtactggaagtgctggcagcgaacggcgttgatgtcattgtgcaggaaaacaatggcttcactccgacgcctgccgtttccaatgccatcctggttcataataaaaaaggtggcccgctggcagacggtatcgtgattacaccctcccataacccgccggaagatggtggtatcaagtacaatccgccaaatggtggcccggctgataccaacgtcactaaagtggtggaagatcgtgccaacgcactgatggccgatggcctgaaaggcgtgaagcgtatctccctcgacgaagcgatggcatccggtcatgtgaaagagcaggatctggtgcagcagtttgtggaaggtctggccgatatcgttgatatggcggcgattcagaaaacgggcctgacgctgggcgttgatccgctgggtggttccggtatcgaatactggaagcgaattggcgagtattacaacctcaacctgaccatcgttaacgatcaggtcgatcaaaccttccgctttatgcacctcgataaagacggcgcgatccgtatggactgctcctccgagtgtgcgatggcgggcctgctggcattgcgtgataagttcgatctggcgtttgctaacgacccggattatgaccgtcacggtatcgtcactccggcaggtttgatgaatccgaaccactacctggcggtggcgatcaactacctgttccagcatcgtccgcagtggggcaaagatgttgctgtcggtaaaacgctggtttcttctgcgatgatcgaccgtgtggtcaatgacttgggccgcaagctggtagaagtcccggtaggtttcaaatggtttgttgatggtctgttcgacggcagcttcggctttggcggcgaagagagcgcaggggcttccttcctgcgtttcgacggcacgccgtggtccaccgacaaagacggcatcatcatgtgtctgctggcggcggaaatcaccgctgtcaccggtaagaacccgcaggaacactacaacgaactggcaaaacgctttggtgcgccgagctacaaccgtttgcaggcagctgcgacttccgcacaaaaagcggcgctgtctaagctgtctccggaaatggtgagcgccagcaccctggcaggcgacccgatcaccgcgcgcctgacggcggcaccgggcaatggtgcttctatcggcggtctgaaagtgatgactgacaacggctggttcgccgcgcgtccgtcaggcacggaagacgcatataagatctactgcgaaagcttcctcggtgaagaacatcgcaagcagattgagaaagaagcggttgagattgttagcgaagttctgaaaaacgcgtaaacacatttaataaaaaaagggcggtcgcaagatcgcccttttttactttgcttttttaaccgtgtttatttttcagttcaaagcgtggtgataccagaccatacagtgtccaaccaaggaaggtcacgatggaaccgtacagcatggcttcttccccggatgagtacagcgcataaaagctatacatcgcgccaacaaaagcaacaaagtttgcaactttcgcttttgaggggggcacattagcgaccttctgaataatgactaatgccgccattgacagaatatacggaatgatattggtcaccacggccaggttaaccagcacgttgaactgactgtttagcgacgggctaatcgtcatcagcgccaacccgctctggataatcacaatggtcaacattccctgcaccggtgcatccactttggttacacgggagaaaattttagggaagtagccttcatcagatgaagacttaaacacctgggcaatggtgaactgccagccaagcagcgaaccgcagcaggacatcaccatcagcgccataatgactttacccacttctggtgtgaacatctgtgcgaaggccaggccaaatggtgccgttgaatttgccagctccatattaggcacaatccctgcaatcacgttggtggagacgatataaatcaccgccgcacctaacgtaccgccgagtaccgcgattggcacattacgttccgggttttccactacatcagtattcgcacacgcagactccagaccgagaaaagcccacagcgtcatagcgatggaagaacctactgcactgaagaacggtgcatgatgcggattccaggaatcaacgtaaagcgtcgggctaaaccagaaccagccgataatgcacaggcctaccaccggaataatgaccccccacacggtaatgctactgatttgcccggtaatgcgcgcaccaccaaagttagccacggtacaaatccacagcaccccgatggtcgcaagaccaatctgcactggcgacaaactcgcgccgagcagttcggtgccgtaaccaaccgccgaaatagcaatcgcgacgttagcaatcagcagtgagacgccgtaggtatagttcgccataaagttaccggatttaccgaaagcatactcggcataaccgcccataccacctgatttacggctgaacataccgcattttgcgaatgcccatgccagtgccattgagcctacggctgtcaccagccaggagataattgaaattgtcccaacttcggcaagctttgtcggcagcatgatgataccggagcccatcatgttgaccatcgtcagtatggttaactgaacgacgcccattttgttcgatttagcctgactcataatttttcccctttcaacagggtgctttgcgcatcacgaggcttgatgacatagcaccaaacttgcttacgaccatcatgttcttcgatatagacaccctgcagctccggtgcaaaacctggcagcaggttgatcccttcttccagagcgctgaagtaacgcaaaacagcaccaccccagatttcacccggaacaacacacagcacacccggaggataaggaagcgccccttcggcagcgatacgaccttcggcatccggcagacgaaccagctccacttcaccgcgtaaataggcgtagttggcttcttgcggattcatgctgacgtgtgggaagtgcgctttgcggaacatctctttttgcagttgtttcacgttgtgtcgggcatacaaatcatgcatttcctggcacaactgacgcagggtataaccggcgtagcgctcttcatgctgtttgtagatggaaggcagcacttctgctaatggcgcgtcggactcaagcagtttttcgaagcgtaccagcagggcaacaagttgctgaagtttggccatatcttctgccggagtcagcaggaagaggatggagttaagatcgcatttttccggcactacgccattttcgcgcaggaagttagcaagaatcgtcgcgggtacaccgaacgcttcatattcgccgttacgtgcatcaatacctggggttgtcagcaacagtttgcaaggatcgacaaagtattgattctctgcatagccttcaaaagaatgccagtgttcccctggtacaaactggaagaagcgcagatcaaccgcaatttgcgctgtttcatacgactgccagggtttaccatccaccagttcaggtacgaacggacgaatatgctgacagttatcgaggatcagtttgcgggcattaatgccatttaccacacaatccatccacatattacgaccgctgacaccttcatgcattttggcgttgatatccagtgcggcaaacagcggatagaacgggctggtggaggcgtgcatcataaaggcgttgttcatgcgtttgtgcggtacataacgctgttgccctttgatgtggctgtcttttttatggatttgtgaagtttgagaaaaaccagcctgctgtttatgtacggattgcgtaaccagaatacccggatcgttctcattaagatccagcaacagcggcgaacagtcagccatcatcgggataaattgctcatagccaacccatgcggagtcaaacagaatgtagtcacacagatgaccaattttatccaccacctggcgggcgttataaatcgtaccgtcgtaggtgcctaactgaatcacagcgaggcggaaaggacgagcctcttttgcccgctgcggtgcgacttccgcgatcagctcacgcaggtaactttcttcaaaacagtgcgcatcaatgccaccgataaagccatacgggttacgtgccgtttccagataaaccggtgttgcaccagcctgtagcaacgctccgtggtggttagatttgtggttattgcgatcaaacagcaccagatcacccggtgttagcagggcgtttaaaaccactttgttagaagatgaagtgccatttagaacgaagtatgttttatcggcattaaacacttttgccgcatgttgctgtgcaatgcatggcgcgccttcgtgaatcagcagatcgcccattgctacgtctgcgttgcataagtcggaacggaacagcgtttctccgaagtactccacgaactgattccctgccggatgacgacggaaaaactcacctccctgatgacccgggcagtcaaaagcgctattgccctgattgacataatcgaccagtgcgcggaagaagggcgggcgcagttgcgtttcataatggctagcagcggtttctaactgacgtccataaaactctttccgtgattcgcaatgctcgaagacaccagaaatacgtggcagatattctgctggtacacgttcttcattttccgttgcaataaaaacaggaatgccatagccagtagcgtctatttcatcgagttttccacgttcaacatcattgactgataaaataatggcggcaacgtcaatataattactttcgtcaatattcacgcatgcacgatgagtggaaaaacaatccgggcaagaacggctaacggcaatttttaattctgacattttattcatctctttatttcaggtaatagcaggtcctcaatttctcaaaggagaaatcgatcacgccggaaaaaaagcaaagctccaccgctgataaataaatcagtagtttgctttttgcagatgcaataacccagaccagcccggtaactggctatactcgtcatacctcaagttgcaagtgctgcgactcgaattatttagagtttaaaagggttagcagtatatgagcaccgaggaatacaggtattaacctgtaatgcttaaagtcagggagacctgtacgttggggtgccctttagtcagaagactagcgggcattaaagaaatgaaagtcaaaactattacgatgggcaaacttcatgatatgggttgtccgccttatatgaggcattaagcggttattattttccatttacctttacctcttgctgtgtcagttgaaggtagagttattctatccatgaaatggctataatctgtgaagaagatcaacaaaaaacgatcataccccagataataaatcattaattatgaatatcgccatattagatgctgttttgttacttaaatgttgtaatttcgtgttttatatttgcgttaagaaattaggtgatgctgccaacttactgatttagtgtatgatggtgtttttgaggtgctccagtggcttctgtttctatcagctgtccctcctgttcagctactgacggggtggtgcgtaacggcaaaagcactgccggacatcagcgctatctctgctctcactgccgtaaaacatggcaactgcagttcacttacaccgcttcccaacccggtacgcaccagaaaatcattgatatggccatgaatggcgttggatgccgggcaactgcacgcattatgggcgttggcctcaacacgattttacgtcacttaaaaaactcaggccgcagtcggtaacctcgcgcatacagccgggcagtgacgtcatcgtctgcgcggaaatggacgaacagtggggctatgtcggggctaaatcgcgccagcgctggctgttttacgcgtatgacagtctccggaagacggttgttgcgcacgtattcggtgaacgcactatggcgacgctggggcgtcttatgagcctgctgtcaccctttgacgtggtgatatggatgacggatggctggccgctgtatgaatcccgcctgaagggaaagctgcacgtaatcagcaagcgatatacgcagcgaattgagcggcataacctgaatctgaggcagcacctggcacggctgggacggaagtcgctgtcgttctcaaaatcggtggagctgcatgacaaagtcatcgggcattatctgaacataaaacactatcaataagttggagtcattaccaagaaattaaacctgccaaataataatattcggcgcaggtttaataataaattaatcactatttaagcgaatttattgaataacaattcaaagcataaaccgatatccaataccggtttcagtaatgaagtggcgaggccgggccggatcctgttccagtttttgtcgcagatgtcccatataaatacgcaaatagtgactgtgttcgaccgcgtttggcccccacacctggttaaggagctggcgctgggtgagtacttttccggcattgttgagcagcaccgccagcaggcggaactcaattggtgtgagatgcacctcttcctcaccccggtgaatcacgcgggcggctaaatcgacggtaacatcggaaaatttcaccagcggatcgggcgcggcggtggcggagtggcggcgtaaagcgacgcgcagacgggcctgcaattcgccaatgccaaacggcttactcagataatcatccgctccggcatccagcgcggcgatcttgtcgctctcttcgctgcgtgcggaaagcacaatcaccggcaccgggctccactggcgcaggtcgcggataaactcaatcccatcaccatcgggcaggccgagatcgagaataatcaaatctggcttacgggttgccgcttccagcaagccgcgttgcagagtttcggcctcaaagacgcgcatcccgtcgccctccagcgccgtgcgcagaaagcgacgaatagcctgttcatcttcaacaatcagaacgtttgtcacatatcctcatgaaagtcttcaagttcaggagcggtttgctggggaagtgtaacacgaaaacaggcaccaccttccggtcggttgaacgcggtaatggtgccgccgtgtacatccacaatcgcccgacaaattgccaacccaagcccgacacccggcaccgccgactctttattcccgcgagcaaacttatcaaatatcgtctgctcctggcctggcggaagaccggggccgttatcccagacatccagttgtagattttcgccctcaaagtgggcatcgataccaatttcggcctgcgcacccgcatatttcaccgcgttctccagcagattaatcagcacccgttcaaagagtggcccgtcaacgtggattaaggtcagcggttctggcagagaaagattgatgggcgacgataaacccggttccagcatttgcagcgcgctgccgactacttcttccagcgttaaccactctttcttcaaattaaagccgccggactgaattcgcgccatatccagtagattattcaccagtcgggtagtgttcagcacatgctgacgaatctcgctggcctggcgggcgtggggtgatccttcgcttgccagatcgagcgttaagatttctgcctgaccaaacagcaccgtaagcggcgtgcgtaaatcatgcgaaagcgctgccagcagggcgttgcggatctgttcacgttcgcttgccatccgcgcctgttcttcgctggcggttagcgtcagccgctcaagggcattggcgactaacagcgtaaacgtctccagcaggcgctgctgttccgggatcatcaactggcgcagattccccggctccaccaccaccagcccgtaggttttctcgccgctttttagcggcaaaatctggtacggtacaccgggtaacgtgtcggtgcccgcgcccgcaggcaggcctttatcaaaactccactgcgcgatggcatcgtcccatggcgtcattccttgcggatgtgttaacggctgcaatttaccgttgtcatcgggcaacaacacctgactgcgggcatgaaacgtggaggcaataaattgttcgctggtggcggcgatgtcctgcggactgcggcccaccgccagagctttcgacatttcatataagtgccgtgtgcgttgctcgcggtaacgggctacccgcgcctgataacgcacgccagcagtaaggttcccgatcaccagcccgacggttaacatcaccgcgaaggtcagcagatattgcacatcagagacggcgagcgtgccgcgtggggcgataaaaaagagatcgaaactcaccacattaatgacggtggcaaccaccgaaggccagcgtccataaaatagcgccaccaccaccacgccaagcagatacagcatcaccaggttggcggcatcaaacgccatcagccactgcatggcaattaaggtgataacggcgcataacgcggcggcaaccacgcatccctgaatctgtacccgccacttgtctttaaaagagcggctatccggcgcgttgttaatcgtgcgggcgggtggttcatcaagcgcgaccagcacctgatcgagatcgggggcgatgcgcgccagtcggtcagcaaacgtttcccgacgccaccagcggcgcgaggccgggcgaccgagaataatcttgccgagattatgttcacgggcataacgcactaccgctttctcttccgctggatcagaaagtgttgccgtctccgcgcccagttcctgcgccagacgtaaggcgctgagaattgcacgacgttttttctccggtaagcgatgcagggcaggggtttcaacatacaccgcgtgccagacgctacccagccgtgacgccagccgcgccgccgcgcggaccagcttctcactaccggtgttatggccgatgcataaaaggatcgcgtcgcgcgtgtgccagactttctcttcgctaggatgcccccgccaggcgcgcatttgctcatcaacgcgatcggcagtacggcgcagtgccagttcgcgcagggcgatcagattgcctttgcggaaaaaatgttcaatggcgcgctccgcctgcccggcaatatagactttgccttctttcagccgctggcgcagatcgtccgggggcaagtccaccagaaccacgtcgtcggcggcatcgaaaaaaggatcgggcacggtttcccgtacctgaattccggtgacgccgctgaccacatcattcagactttccagatgctgaacgttgacggtagtgaaaacatcaatgcctgcttccagcagctcttcgatgtcctgccagcgtttagggtgacgagaacctggcgcattactgtgcgccagttcgtccattaagatcagcgccggacggcgggcgagggcggcatcgaggtcaaactcgcagatgtgccgcccacggtacgccaggcgttttggcggcagaacagccagcccttccagcattgcggcggtatcttttcgcccgtgggtttctaccacgccaaccacaatatccagcccttgcgcccgcagtcgctgggcttctgccagcatcgcccaggtcttcccgacgcctgcacaggcaccgaagaaaactttcagcttcccccgatgcggcgcggcagtttgttccagcagacgatcggggtcgggacgtaagggttcgttattcatcaagcttatccagcgccagattgagttcgacaatgttgacgaccggctggccgatatatttcaccagcggttgttggctgtattttgcgatcagctgcgtgagctgttcaacgctgagattacgcgctttcgcgatgcgtgggatctgccaggccgccgcttgcggggtgatattattgtccagcccgcttgccgatgccgtcaccagttcaaccggaatgctcgcgctggcatccgggttagcggcccgtaatgcagcaacgcgtgcggctattagtttatccagctcagggttactgaccgccagattgctcccgccagaagcctgtggattatagggcatttcagccgttgctgacgggcgaccatgaaaatagccgttgccggtaaaattctgcccgattaatgccgagccacgcaccgtatcaccttcacggatcaacgaaccgttggcctgccagggaaaccaccattgccccagtgcggtggtcagcagcgggtaaacgccgccagtaatcaataacagaaagagaaatgtcgataatgccggacgtaatccactcatggtaaacctcacaccagaccgcaaacggtcagcagtaaatcaatgactttgataccaataaacggcaccagcagcccacccagaccgtaaatccataagttacggcgcaacatggcagaagcggtaagcggtttataactcacgccttttaacgccagaggaatcaaaaagacgataatcaaggcgttgaaaatgaccgcactgagaatggcggagtcgggcgaatgcaggcgcatgatgttcagcgcatttaactgcggatatgttgccgcgaacgccgccggaataatggcgaagtatttcgccacatcgttggcaatgctgaaggtggtcagcgagccacgggtcatcagcatctgtttgccaatgtgcaccacctcgatcaacttggtcgggttagagtcgagatccaccatattgcccgcctctttcgccgcctgggtgccggagttcatcgccaccgcgacatctgcctgcgccagcgccggagcatcgttggtgccgtcgccggtcatcgctaccaaacgaccttccgcctgatactgacggatcaatgccagcttggcctccggtgttgcttcggcgagaaaatcatcgacacccgcttccgcagctatcgcggcggcagtcagacggttatcgccggtaatcatcaccgttttaatgcccattttgcgcagctgggcgaagcgctctttaataccgcctttgacgatatctttcagcgcaataacgcccagcacacgagaaccttccaccaccaccagcggcgtggctccctgacgcgcaacctgatcgactttttgatcaacatcggcagggaagtgaccgccgttagcctcaatatggcggcgaatggcatcgacagaacctttacggatcatgcggttgtcgatgttgatcccgctcatccggctttgcgcagtaaacggtacaaaggtggcatggagcgactgcacatcgcgctcgcgcaggttaaaacgttgcttggcgaggatcacaatactgcgaccttccggcgtttcatcagccagcgaagccagttgtgcggcgtcagccagcgttttttcatccacgccctgcgcggggataaactccgacgcctgacggttaccgagtgtgatggtgccggttttatccagtagcagaacgtcaacgtcacctgccgcttcaactgcacgtccgctggtggcaatcacattcgcgcccagcatccgactcatcccggcgacgccgatcgctgacaacaggccgccaatagtggttgggatcagacagaccagcagcgccaccagtaccgttacactcacggcattaccgccccacgcggaaaacggccacagcgtggcggttgccagtaaaaagacgatggtcagagcaatcagcaggatagtcagggcaatctcgttcggtgttttgcgtcgctgtgcgccttccaccatcgcgatcatccgatccagaaatgtctcaccggggttaacgctacactcaatcaccagccagtcagaaagaatacgcgtgccgccggtgacggaggcaaaatcgccgccggattcacggatcaccggtgccgattccccggtgatggcgctttcatcgaccgatgcgccgccttcaatgacttcaccatcgcaggggataatatcgccagcttctaccagcacgatgtcacctttacgcagttgatcggcaggaactttgtccgccgcagcgccatatttcggctcacgcagcttgcgggcaaaggcagtttttttcacccctttaagactgttggcctgcgctttactgcggccttctgccagcgcctcggcgaaattagcgaacagtacggtgacccacagccagccgctaattgccgcgctaaacagcgcattgccaggcatcgcaccgcttgccatcgcgatgctaatacaggtggtcagcagactgccgatccagacgataaacatcaccggattgcgccattgcgcctgcgggtttaattttttcaccgcttctttcagcgcctgaacgacaagtgttggttcgaatagcgccagttgtttacgactcatattcagtgctcgctcaatatcatcaggagagatattccgccaccggaccaagcgccagggcagggataaaggtcagtgcgccaaccagcaacacggtgccgattaacaggccaacaaacagcgggccgtgcgttggcagcgtgccggagctggcgggttggctctttttactcaccagcgaaccggcaattgccatcaccgggataatcaccccgaagcgaccgacaaacatgcagaacgccagtaaacagttccagaacggagagttggcgcttaatccggcaaaggcgctgccgttgttgttagcggcggacgacacggcgtacagcacttcgctaaaaccatgcgggccagggttaagcatggcgctacgtccggcgtcggtcatcatcgccaacgccgcgcccatcagtaccagtgttggagtaaccagaatcgccagtgcaatcagtttcatctcgcgtacgtcgatttttttacccagatattccggtgtacgaccaatcatcagcccggcaataaacaccgccagcaggacaaacagcatcatgccgtaaagaccagaaccgacaccgccgaacaccacttcaccaatttgcattagccacatcggcaccatgccgccgagagcggtaaacgaatcatgcatcgcaatcaccgcgccacaggacgccgccgtagtcacgaccgcaaacaggctactgaccagcacgccgaaacggctctctttaccttccatattgatgctgctgtctgcgccgagcgccagcagatgaggattaccctgaacttctgcccacataaccacgcctacgcagatgacaaaaatcactgacatcgcccacagcaacatgcgcccctggcggcgatcgcccgtcacttcaccaaaggcaaagcacagcgctgttgggatcaagaagatcgccagcatctgcacgaagttggtcagtgcggttgggttttcaaacggatgcgacgagttggcattaaagaagccaccgccgttagtaccgagcatcttgatcgcttcctgagaagctactggtcccatgggtaacagctgttgcgctccttcaacggtattcactgcctgatagggcagaaagttttgcagcgcaccttgttgaataaaaaacagtgcgatcaacaacgccacagggactagcacccataacgtgatgcgtagcagatcgacccaggcattcccgagtgtgctcatgctctggcgagtaaacgcacggatgaaggcaaaaatcaccgcaatcccgctggcggcagaaagaaagttttgtaccgttaagcctgccatctggctgaaatagctcaacgtggtttcaccgctataagattgccagttggtattcgtgacaaagctgacggcggtattcagcgccagatcccacgacagccccggcaactgctgtggattaagcggcagatagtgctgaccgagcaacataaaaaacagcaccgccagccccagcatgttcaggccgagaatggcacaaagatattgcttccagttcatctcatggtcagagacgccaggtaaacgaaagagtatacgttcaacgcccgctgtacctggaagaggaatgtcattaatcagccgcgccagcccgctgcctaaaggacgcgccagcaccattaataccagtaaaaacgtggcaatcagtaagaacccttgcgcagccatcagaacgcctccgcattgatcagggcataaaccaaataacccagtaataaaaacaccagcaacacgccggctatcacgcctgcactcacagtgcacctccagtggcctaaaagtgataccggaagagtagaattctggctgcaaagatttcgcaaaaatctgcgggcggggtgtaaaaaaagtataaaaatggcaaaagccatgatttaactaatgtttagtattaatttaacttttgtgtaacttaattacagagtgaatgtaaataaaccatcaataagcaaaaataagtggtcggatgagtagtaaaattacacaaaaggcggtactattttcatcagataaacaaattcatttttccggtgctattcaccgggtagatacaaaagggggagaaaagtatggaactctacagagaatatcctgcatggcttatctttttacgccgtacatatgcggttgcagcgggcgttctggcgctgcctttcatgcttttctggaaagaccgcgcccgcttttacagctacctgcaccgcgtctggtcgaaaaccagcgataaaccggtgtggatggatcaggccgaaaaggcaaccggtgatttttactgattgctgagttctgaatacattgaaaaccgccagcggaaacgctggcggttttttgtatcaggaagatgttcagaggaatatttagacaccgttataccaatcgaaacatatattcatgaaatatatataaatattttcctaattgtttctatctgacggatatctcacttaaggctttcttataaatctgtagggtcttgcctgtcagcggacaaataacccgataaaacaaggatgagaaatgagcggaaaaccggcggcgcgtcagggcgacatgacgcagtatggcggtagcattgtccagggttcagccggggtgcgcatcggtgcccccaccggtgtggcctgttcggtgtgccccggcggagtgacgtccggccatccggtcaatcccctgctcggtgcaaaggtccttcccggtgaaaccgacatcgccctgcccgccccgctgccgttcatcctctcccgcacctacagcagttaccggacaaaaacgcccgcgccggtggggagcctcggccccggctggaaaatgcctgcggatatccgcttacagctgcgcgataacacactgatactcagtgataacggcggcagaagcctgtattttgagcacctgtttcccggtgaggacggttacagccgcagcgaatcactctggctggtgcgcggcggcgtggcgaaactggatgaaggtcaccggctggccgcactctggcaggcgctgccggaagaactccgcttaagtccgcatcgttatctggcgacaaacagtccgcaggggccgtggtggctgctcggctggtgtgagcgggtgccggaagcggatgaggtgctgcctgcgccgctgccgccgtaccgggtactgaccgggctggtggaccgcttcgggcgcacacagacgttccaccgcgaagccgccggtgaattcagcggcgaaatcaccggcgtgacggatggtgccgggcgtcacttccggctggtgcaaaatggcatctgaatcgatcgcagtttggcattcgaatcgatcatgatttggcatccatctccgatcacagtttggcatcacaatcgatcacgatttggcatacttccgatcattgattggaattcgccagtcactccgggaattaactcttttcaccacagtctccattgccgtgtttaaaccagtggagacgtcaatgtccaaaaagagaaaatccaggagcactatggaaacttgttttaagatccttcagctcaagttcgataagaagctgactaaccgttgtatcggactgacgttacacatcagcgcctcaaccgtttttgaggttcttgcccgcttcaaagcctcttctctgtcatggccattacctgcggatatatcccatgacacgctggagaaactcattttcccgcccaaagacacctctgcgtcagagcttgttatgcctgacatgctgtacttcgatacggaaatgagaaaacctggcgtgacgcgccaactgttgtggatggaatacaaggcacaggcgggtgacaaagcgatgggatactcacacttctgccgttgctaccggaagtggaaaaaaacgcgacgcctctccatgcgacaggagcatcgtgctggcgaaaagctctttatcgacttctgtggtcctacggtccctgttattaatccggacaccggagagatacgccgcgtggcaatcttcgtggctgtaatgggggcgtccaactatacctatgttgaagcgtgcgaaggtcaggacatgatgtcatggttaaatgcccacagccgttgcctgaccttcctgggcggcgtaccgaagctgctcatccccgataacctcagaagcgcagtgaaaaaagccgatcgctatgagcctgtcatcaacgacagttatcaggcgctggctgagcactatggcacggttattatcccggcccgcccgcgcaaacctaaagataaaccaaaagcagaaaacggcgtcctcatcgtcgagcgatggcttcttgcccgcatccgtaatgaaaccttccacacgctcagggcgctgaatgcacgccttcgggagttgctgacggacatgaataaccgaccaatgaagggatacggtaatcaaacccgcgcagaacgcttccgcatgctggatgcaccagcactctctccgctgcctctggagccttatgaatacacggaatacaaagccgtgaaggttggccctgactaccacgttgaatatgcccgtcactggtactccgttccacacgaactggtcggtcagcgtctgtcactgaaggtggggcagtcggtggtacagctctggcacaaggggcagtgtgtggcgcaacatccgcgcagcacacatgaatataaacacacaaccaatccgcttcacatgccagaacgccaccggcggcatgggacatggacaccggaacgccttatcgagcagggaaaccgtacaggtccgtccacaggccgggtggttgaatccatgctgaaagccaaaccccatccggagctggcttaccgtgcagtcctgggtctgctggcacttcagaaaaaatacggcccggaacggctggaaaaggcctgttacgttgccctgcactataacgccccggacagacgctttatcgacaatctgctgcgtcatcatcgggataacgttgagcttccgttatcccgccagggcgaacaacatccggcatatgcttcagagcatgaaaacctgcgtggtcctggctactatcactgacagaaggaacaaccgtatgagtgataatctgttaaacaaactgacccaactgaaactcccggcgatggccgggagcctgatacggcaacgggaaacgcctcagacttacgacgaactgtcgttcgaggaaaggctgacactgctggttgatgacgagcttctgagcagagaaaacagtcgtgtggcacggttgagaaaaaatgcctgcctgaaatatcaggcaacaccggaagggctgcgttatccggcctcaagaggtctgcgggctgaacagatgagggaactgctgaacggccactacataatccacaggaaaaacctactgataaccggtccgacaggatgcggtaagagctggatagccaatgcgctgggcgaacaggcatgtcgacagaaatacagcgtccggtactgtagaaccgggcgattactggaacagttggctcagggacgtgttgatggcagttggctgaaatatctgaaacagttgcaaaaaatacaggttctaatcctggacgatctggggctggaacagttaagtaacgcccagtgtaatgaccttctggagatcacagaggatcgttacggacaaagcagcacgatagtggtaagccagttcccggtagataaatggcatggtctgatggagaacccaacaacagcagatgccatcctggacagactggtacataactcacacagagtggtccttcagggagagtccctgaggaaaaatcccccgacagtggaaagcagcgaaaaaacgagttaaaaagcggtagaaaaagttaagttcccggttgatcgaatggatgcgaatcgctgatcgaacttcgatgccaatccgtgatcgaatagagcggaatacgcagctggtactgaccacgcaggcgcagcgggcagaagaagcccggcagcaggccatttccggcgggacggaaccgtccgcttttcctgataccctgccgggttacaccgaatatggccgggacaacggcatccgtctgtctgccgtgtggctgacgcacgacccggaatacccggagaatttacctgccgcgccgctggtgcgctatggctggacgccgcgcggcgaactggcggcagtgtatgaccgcagcaatacacaggtgcgcagctttacttacgatgataaataccggggccggatggtggcgcaccgtcacacgggccggccggaaatccgttaccgttacgacagcgacgggcgggtgacagaacagctaaacccggcaggcttaagctacacgtatcagtatgagaaggaccgcatcaccatcaccgacagcctgaaccgccgtgaagtgctgcacacgcagggtgaagccgggctgaagcgggtggtgaaaaaggaacacgcggacggcagcgtcacgcagagtcagtttgatgcggtgggcaggctcagggcacagacggatgccgcaggccggacgactgagtacagcccggatgtggtgacgggactcatcacgcgcatcaccacgccggatggcagggcatcggcgttttactataaccaccacagccagttaacgtcagccaccgggcctgacgggctggaaatgcgccgcaaatatgatgaatccggccgtctgattcaggaaactgcccctgacggcgatatcatccgctaccgttatgataatccacacagtgacttaccctgcgcaacggaagatgccaccggcagccggaaaaccatgacgtggagccgttacggtcagttgctgagcttcaccgactgttccggttatgtaacccgttatgaccatgaccgcttcgggcagatgacggcggtgcaccgcgaggaagggctgagtcagtaccgcgcatacgacagccgtggacagttaattgccgtgaaagacacgcagggccatgaaacgcggtatgaatacaacgccgccggtgacctgaccaccgtcattgccccggacggcagcagaaacgggacacagtacgatgcgtggggaaaagctatctgtaccacgcagggcggtctgacgcgcagtatggaatacgatgctgccggacgggtcatccgcctgaccagtgaaaacggcagccacaccaccttccgttacgatgtactcgacctgctgatacaggaaaccggctttgacggccgcacacagcgttatcaccacgacctgaccggcaaacttatccgcagcgaggatgaggggctggtcacccactggcactatgacgaagcagaccgcctcacgcaccgcaccgtgaatggcgaaaccgcagagcggtggcagtatgacgaacgcggctggctgacagacatcagccatctcagcgaagggcaccgggtgacggtgcattacgggtatgatgagaaaggccggctgaccggtgagcgtcagacggtgcatcacccgcagacggaagcactgctctggcagcatgagaccagacatgcgtacaacgcgcaggggctggcgaaccgctgtataccggacagcctgtccgccgtggaatggctgacctacggcagcggctggctgtcaggcatgaaactcggcgacacaccgctggtggagtacacccgcgaccgcctgcaccgggaaacgctgcgcagcttcggccgttatgaactcaccaccgcttatacccctgccgggcagttacagagccagcacctgaacagcctgctgtctgaccgcgattacacctggaacgacaacggcgaactcatccgcatcagcagcccgcgccagacccggagttacagctacagcaccaccggcaggctgaccggcgttcacaccaccgcagcgaatctggatatccgcatcccgtatgccacagacccggcggggaaccgcctgcccgacccggagctgcacccggacagcaccctcagcatgtggccggataaccgtatcgcccgtgacgcgcactatctttaccggtatgaccatcacggcagactgacagagaaaaccgacctcatcccggaaggggttatccgcacggatgatgagcgcacccatcggtaccattacgacagtcagcaccggctggtgcactacacgcggacacaatatgcagagccgctggtcgaaagtcgctatctttacgacccgctgggccgcagggtggcaaaacgggtatggcggcgtgaacgggacctgacgggctggatgtcgctgtcacggaaaccgcaagtgacctggtacggctgggacggcgaccggctgaccacaatacagaacgacagaacccgcatccagacgatttatcagccggggagcttcacgccactcatcagggtcgaaactgccaccggtgagctggcgaaaacgcagcgccgcagcctggcggatgcccttcagcagtccggcggcgaagacggtggcagtgtggtgttcccgccggtgctggtgcagatgctcgaccggctggaaagtgaaatcctggctgaccgggtgagtgaggaaagccgccgctggctggcatcgtgcggcctgacggtggcgcagatgcaaagccagatggacccggtatacacgccggcgcgaaaaattcacctgtaccactgcgaccatcgcggcctgccgctggcccttatcagcacggaagggacaacagcgtggtgcgcagaatatgatgaatggggcaacctgctgagtgatgagaacccgcatcatctgcagcagctcattcgcctgccggggcagcagtatgatgaggagtccggcctgtattacaaccgccaccgctattatgacccgctgcaggggcggtatatcactcaggatccgattggactgaaggggggatggaatttttatcagtatccgttgaatccggttcagtatatagattcaatggggctggcatctaaatatggacacttaaataatggcggatatggagcgaaacccagcaaaccgcctacgcccgatccaagtaagttgccagacatagcgaaacaattaagactgccatatcctattgaccaggccagtagtgcgcctaatgttttcaaaacattcttcagagcattaagcccttacgattacacactgtattgcaggaagtgggtaaaacccaatctgacttgtatgccgcaggatgatccccagtatccagggatggagacaaagacagcaagtgattacctgccacagacaaattggtcaacaactcaattacggtgatgctgccaacttactgatttagtgtatgatggtgtttttgaggtgctccagtggcttctgtttctatcagctgtccctccagttcagctactgacggggtggtgcgtaacggcaaaagcactgccggacatcagcgctatctctgctctcactgccgtaaaacatggcaactgcagttcacttacaccgcttctcaacccggtacgcaccagaaaatcattgatatggccatgaatggcgttggatgccgggcaactgcacgcattatgggcgttggcctcaacacgattttacgtcacttaaaaaactcaggccgcagtcggtaacctcgcgcatacagccgggcagtgacgtcatcgtctgcgcggaaatggacgaacagtggggctatgtcggggctaaatcgcgccagcgctggctgttttacgcgtatgacagtctccggaagacggttgttgcgcacgtattcggtgaacgcactatggcgacgctggggcgtcttatgagcctgctgtcaccctttgacgtggtgatatggatgacggatggctggccgctgtatgaatcccgcctgaagggaaagctgcacgtaatcagcaagcgatatacgcagcgaattgagcggcataacctgaatctgaggcagcacctggcacggctgggacggaagtcgctgtcgttctcaaaatcggtggagctgcatgacaaagtcatcgggcattatctgaacataaaacactatcaataagttggagtcattaccttatcaggcctacgtatttcctgcaatttattgaatttgcacaaatttgtaggctggataaggcgttcacgctgcatccggcatctgggctcgattgcctgacgcgtctgttatttccccttccgcgccgcctcatacgctgccaacgtttgtactctcgcctctttgtgctcgactatcggttgcggataatccagcttcacacctgctttctgcgcccacttccacggctcatgcaccgatttccccggtacattgcgtagttccggtagccactggcggataaactcaccttcgagatcaaatttctcgccctgggttgtcgggttgaaaatacgaaaatacggcgctgcatcggttccggttgaagcggcccactgccagccaccgttattggctgccaaatcaccatcaatcagctgcgacatgaaatatcgctcgccttcgcgccagtcgatcaataaatctttcaccagaaaactggctgtaatcatccgtagcctgttatgcatccagccagtgctgttaagctgacgcatagcggcatcaacaatcgggtatcccgttttgccttcctgccaggcctgtaaatgtgcgggattgctctgccactgtacacgatccgtccaggcaataattggacgatgtttacacaacgaggggtgatacgttatcaggtgacggtaaaactcgcgccagatcagctcattaagccagacactaccgaccccaccgtccagcgcctgcggctgttcagccaacaagcgatgcaagcactggcgaggcgataacccgcccgttgccaggctggccgacaaacggctggtgccttccactgccggaaaatctcgttgttgctcatattctccggcaccgttctggcaaaactggcgtaattgcgcaatcgccgctttttcttccaccggaaaatgcgcagtatcgaaagactgacgaggataattcagcgtaatggatggcgagggctctatcgatccgctactacgaacttttggcgcagcgacgcactccggcatcccttcccgcagccgtttcagccaggcattcttaaaaggcgtaaagactttgtacatctcgtgattaccggtcatcaccgcgccaggcggcaggatcacgctgtcatcaaatccttcacacaccacgttacgcagcgctctttcaacttccacatcccgcgcccgctcattcacttcatactgatagttataaaacaggtgggtaacgctgttttccgcgcacacctgtttaactatttcgacactggcgacaaagtcatccacttcacggaacaataaaggaatacctttttccgcaagcgctatttgtagcccattcagttgagcattgataagttcagcctgacgcggcgacatgttatgcgtcgcccactggcgtggtgtagcgatatacaacgccagcacgcgtgcagacgaattgcggcaggcggcagccagtgcgagattatcgtgcagacgtaaatcttggcgaaaccagaccagatgggtagtcataaaactcctgaatggcgcaagttaatcacacgcggccaaagttcgaaataacgctgccctgaaagccaggcgtcatgataaagcgccatatagtgtttgatacgcatcagcggcgcaagaagtggttgctcgccacggcgataactgtcgataagcgcagccagctgctggcgttctgtggaatcaatatgcgggcgaaaataaccctgaacgtgcatcaaaacattggtgtgatcgcgcgggttggcggggtgagaaagcaaaacaactacgcgttggcggtactggttgtaatagtcatccagattttgccactggtgaatatcagccacgaacgggccaagtttgcggtactccggctgagaatgcgccagaaagacgagtttatagcggctgtgataatcgagaagcgccccgcgcgttaagccatgttctttcagtcgatgtaactcatgaagggcaaagatacggattagggtgctgtcatcaaatcgttgtagattcattactgctcctgaacggtataaaggagtaagtgtagacgatggtaaatgaattttatggggcagagtttttgcggggaagtattttgttggtaaaaatattatcaacttcatctgagtgagaattattctactatttcccgagctgcattcattttttgtattttttatttttagaaaataacagttctcaaagcttaattacctcactattaattgtatttcaaactaacaatcgcactccattttctctttttaaaaaacataaacactgttaaaacaaatacttatttcgttatcttaaatgctatttctacatcactcgtccttataatcaaattattcttattcatagctatttttgcaggtttaaaatagcggctttcaccaaagtcagccatgaaaattagactacaagtcagggcaagattacgaaagcccgctccccgcaaggactgacgccagatagtttctgtccatggctgcttttcgcatcttacgtcttaaccctgccttggtaatgactccaacttattgatagtgttttatgttcagataatgcccgatgactttgtcatgcagctccaccgattttgagaacgacagcgacttccgtcccagccgtgccaggtgctgcctcagattcaggttatgccgctcaattcgctgcgtatatcgcttgctgattacgtgcagctttcccttcaggcgggattcatacagcggccagccatccgtcatccatatcaccacgtcaaagggtgacagcaggctcataagacgccccagcgtcgccatagtgcgttcaccgaatacgtgcgcaacaaccgtcttccggagactgtcatacgcgtaaaacagccagcgctggcgcgatttagccccgacatagccccactgttcgtccatttccgcgcagacgatgacgtcactgcccggctgtatgcgcgaggttaccgactgcggcctgagttttttaagtgacgtaaaatcgtgttgaggccaacgcccataatgcgtgcagttgcccggcatccaacgccattcatggccatatcaatgattttctggtgcgtaccgggttgagaagcggtgtaagtgaactgcagttgccatgttttacggcagtgagagcagagatagcgctgatgtccggcagtgcttttgccgttacgcaccaccccgtcagtagctgaacaggagggacagctgatagaaacagaagccactggagcacctcaaaaacaccatcatacactaaatcagtaagttggcagcatcaccggcctgataagacgcgtcaagcgtcgcatcaggcatcggtgctggcctattatgactccagcgccagcgcgcggtttctgaatttcagcgcctgatacagccaaatcatcagtaccagtcctacacacgccagtgcgccccaggtaatttgatcaaatacttcaatatatgcattgatggagtagttgatcgccccggaagcatcaaacgaagcctgcgatgtctgatcggcaatcacgcccgccagatagttcgcgatcgcgccagaaagcagcatgtagatgccggttaatacgccggtcacgcccggaatttcaatgcgcgtaatttgcgacatggcaaccgggtcgataaacagttccgcaaagcccatcaccgcgaggcctaacaccatcagtggcagagaagagtgaccatacattgcggaccagcgggcgcttaaggtcagaatgcagaatccggcgctcatcaggccaaggccaagagcaaattttccccagatgcgcacggtacgattacctgcgacgctttctttaaccacccacgccaggaacacaccgcatagcataactgcgaaggcattaatcgactggaacatagcagtcggaacggtataaccaaacatatcgcggttaacgaagcggtcgatataaaggctaattgagctgccgccctgttgtgcgaaggcccagaacaacatactgaagaaggtgagcgtcacaatcagccccagctccttacgctgtttctggttttctgctttgcgataaatttttgccagtacacccaggccaataatagtcgcgacaattaaggcgtataccgaccactctttccagaacagtacggtaatcagcgcaggcgttgccaccagcagaaccagcagccatccccagttaggcaggagaaagtttgttgcacgcagtacttttttattaacgccgcgggtatgtgtgaaatgacgattgccacataagaaaatgaccagacccgcgatcatacccaccgccgccaggccaaagcccatcgcccagctgtactcttcctgggcgtaaccacaggcgataggtgcgataatagaccccacgttacccgctgcatacatcagcgagaaaccgccatcacgacgcggatcggttggctcatacagctcgccgagcaggcaactgacattggatttaaacagaccatagccacaaacgataatcgccagggacagatagaggaatgacggatggatctcactggcacccagcaccacatgaccgatcgccatcaacaacgcccccagcatcaccgccatgcgattgccgagaactttatccgccaaaaagccaccgaggattggcgtgacatacaccagcgaacagtaggcgctaaataactcgtaggcgtgagtatcgttgtattttagttgattggtgagatagagaatcagcagggcacgcatgccgtaaaagctaaaatattcccagatttgcagcgcaacgacatagtaaatagtgcgcggttgtgatgcgtgtttattcataataattccacaattgactgcaacgtcacgtaatagttgcgcggcgtgcttgtgtttccttaaagttaaaactttgatacagatctgattatttatgcaatatgctgtctgattgcataaatatacattagctgaagcgtgatgatataaacaatttgcgtcttttggcgtcgggtttgtttcttaatatgtcaaaagattggctatcgacgaacaggcgaggtaacgctatgttaacggtgtagctatcagaatacggaaggcgcgaagatgaaaaacaccgaactggaacaactgattaacgaaaaactgaacagcgcggcgattagtgattacgcgccgaatggtttgcaggtagaaggcaaagagacggtgcaaaaaattgttaccggtgtcaccgccagccaggctttgctcgatgaggcagtgcgtctgggcgcggatgcggtcattgtgcatcatggctacttctggaaaggagagtctccggtcattcgcggaatgaagcgtaaccgtttaaaaacgttgctggcgaatgatatcaacctgtatggctggcatttgccgcttgacgtacatcctgagctgggcaataacgcacagctggcggcgttactggggatcacggtcatgggcgaaattgagccgttggtgccgtggggagagctgaccatgcctgtgccgggactggaactagcctcctggattgaagcgcgtctgggacgtaagccgttatggtgtggcgataccggacctgaggtggtccagcgcgtcgcctggtgcacgggcggcgggcaaagttttatcgatagcgccgcgcgttttggcgtggatgcttttattactggcgaagtttctgaacagaccattcattcagcccgcgagcaggggttgcatttttatgctgcaggtcaccatgccactgaacgtggtggtattcgcgcattgagcgagtggctgaatgaaaataccgatcttgatgtgacctttattgatattcctaatcctgcataacgaataatcagagggatcgaaagtgcaacgagcgcgttgttatctgataggtgaaacggcggtagtgctggaactggaaccgccggtgacgctggctagccagaaacggatctggcgactggcgcagcgtctggtggatatgccgaatgtggttgaagccattcccggcatgaacaatatcacggtgattttgcgtaatcctgagtcgctggcgctggatgccatagagcgtttgcaacgctggtgggaggagagcgaggccctggaacctgagtctcgctttattgaaattccggtggtttacggtggtgcaggcggaccggatttggcggtggtcgcggcgcattgcgggtttagcgaaaaacaggttgttgaattgcactcctccgtggaatacgtggtctggtttttaggttttcaaccgggcttcccgtatctcgggagtttgccggaacaactacacacgccacggcgcgctgaaccgcgcttgctcgttccggcaggttctgtcgggatcggcgggccgcagactggtgtttatccgctggcaacgccgggtggctggcagttgattggtcatacctcactcagcctgtttgatccggcgcgtgacgaacccatcttattacgtccgggagacagcgtgcgctttgtaccgcagaaggagggagtatgctgaagattattcgtgcgggcatgtataccactgtgcaggatggcggtcgtcacggttttcgccagtcgggaatcagccactgcggcgcactggatatgcctgcgttacgcattgctaacctgctggtgggtaatgacgccaatgcccccgcgctggagatcacgctcggtcagttaacggttgagttcgaaactgatgggtggtttgctctgacgggtgccggttgcgaagcgcggctggatgataatgccgtctggaccggctggcgattgccgatgaaagcaggccagcgtttaacgcttaaacgcccgcagcacgggatgcgcagttatctggcggtcgcgggtggtattgatgttccgccggtaatggggtcatgcagcaccgatctcaaagtggggattggcgggctggaaggccgtttactgaaggatggtgaccgactcccgattggcaaatcgaagcgtgattttatggaagcgcagggcgttaaacagctgctgtggggcaaccgcattcgcgccttgccggggccggaatatcatgagttcgatcgcgcctcgcaggatgcattctggcgttcgccctggcagcttagctcgcaaagtaaccgcatgggctatcgcttacaggggcaaattttaaaacgcaccaccgatcgcgaactgttatctcacggtttgttaccgggcgtggtgcaggtgccacataacgggcagccgattgtgttgatgaacgacgcacagaccaccgatggttacccgcgtattgcctgtatcattgaggctgatatgtaccatctggcgcaaattccgctcggtcagccgattcattttgtccagtgttcactggaagaggcactgaaagcgcggcaagatcagcaacgttatttcgaacaattagtgtggcggctgcacaatgaaaattgacctgaacgccgatctgggcgaaggctgcgccagcgacgcagagctattaacgctggtttcctctgccaatattgcctgtggatttcatgcaggcgatgcgcaaatcatgcaggcttgcgtgcgtgaagcaataaaaaatggtgtcgcgattggcgctcacccgagttttcccgacagggaaaattttggtcgcagcgccatgcagctgccgccagaaaccgtttacgcccagacgctgtatcaaattggcgcgctggcaacgattgcccgtgcgcaaggcggcgtaatgcgtcatgtcaaaccgcacggcatgttgtacaaccaggcggcgaaagaagcacaactggcagacgccatcgccagagcggtatacgcttgcgatccggcattgattctcgttgggctggcaggaagcgagctgattcgtgcaggcaagcaatatggcctgacaacgcgcgaggaagtgtttgccgatcgcggttatcaggctgacggctcgctggtgccgcgaagtcagcgaggcgcgttgattgaaaacgaagaacaggcgttggcgcaaacgctagagatggtgcaacacggcagagtcaaaagtatcaccggcgaatgggcaacggtcacggcgcaaacagtctgcctgcatggcgacggcgagcacgcactggcgttcgcccgccgactacgctctacatttgccgaaaaggagattgttgtcgcagcataaccccgattaataaagaatgaaaaaaggatatcaccatgcctgaaggcccggagatccgccgtgcagcggataacctggaggcggcgatcaaaggcaaaccactaactgatgtctggtttgccttcccgcagttaaaaacttatcaatcacaacttatcggtcaacacgttacccatgtggaaacgcgtggtaaggcgttgttaactcatttttccaacgacttaacgctctacagccataatcagctttacggcgtctggcgcgtggttgataccggcgaagagccgcagaccacgcgagtattgcgggtaaaactgcaaacggctgacaaaaccattctgctttatagcgcctcggatattgagatgttgaggccggaacaactgaccacgcatccgtttttacaacgcgttggtcccgatgtgctggatccgaatctgacgccggaggtggtaaaggaacggttattgtcaccgcgctttcgtaaccgtcagtttgcaggattactgctcgatcaggcgtttctggctgggcttggcaattatttgcgggtggagatcctctggcaggttgggttgactggaaatcataaagcgaaagatctcaatgcggcgcaactggatgcactcgcacacgcgttactggatattcctcgattttcctacgctacgagggggcaggtggatgagaataagcatcatggggcgctgtttcgctttaaggtttttcatcgtgatggcgaaccgtgcgaacgctgtggcagcatcattgagaaaaccacgctgtcatctcgcccgttttactggtgccctggctgccagcactaggccgaccgcttcggcgcataggttgaaataaaccgcgcaatggctggccccgtcagcaaaatactgaacaggcgcagggtttgcatcgccataataagcgccatatcggcattgctccctgcggcgatgaccgccacggtatcaagcccgccgggactggtggcgaggtaggcagtcataaaatcaatgtgcataaaccgggtcagcccccacgccatacccgcacaaatagccagcagagcaaaaatcgacagcaggatttgcggtagcgggcgtagtgcccgcagtaagatttgtttatcgaaaccaagaccaatccgccagccaattgccatatacgccatcgccagcagccattccggtagttcgatggtgatgagctgaccagactggagcactgcgcccgccagcatcgggatgagcatcgtgccggaaggaagacgcagcatgcatcccgccgtaccggcaacgactgcgagcaaaatcgtaagcaggagattaatgctcactggcgggaaccagacgatttgctggttaaccgcttcagcgttatcacccagcatcatgcgggtgaccagaacagcggcccccgcgacgaacagcactcgcagatattgcataaatgcaaccaggcgaatatctgcgccgtaatcttgcgccatagcgaccattgccgctgcgccgcctggagaagaaccccaggcaccggtatttccaggcagtgagctatagcgcaccaataaccaacccacgatggcgctggaaagcagcgtcaccagtaaaatagcaagcacgatcggccagttggcggccagcgtggtgagaatcgaaccagtgaggttttgcgcaatcatgcagccaagaatggcctgcgcggcgagaaaagcggagcggggaagttgcagagtaattccgcgcatactgaagatgatcccggcgatcatcggcccaagtaatagcgccgccgggagatgtaccgcgaggaaaccaatagaaaggagaagtgatagcacacataacattccccactgcaaaactggcatccttcgctccctcattattttctctttggtgtatcgatacagcataaagaaagccgggccaggaaaaaataacagcaatcaaggaaaaggggaaaatcagcaattttctgaaagagatgccctttccggctgcaaagggcatcatggcaaatcagttatagttaattttaaaaagcaccactgtatcgaagggcccagcctcgatgggggtacctgcaatggacgaaagttcagctgtataggttttttcgtagaccaacatgtcgctggtgaaatcggcgtattcagcatatttattgaaggtataaggcgaggcgttttcatccagcaaacgtagcttcagaccattaccaatcaacaatgctttatcttcttcaaccaacgtttcttcggtataaaaggaggaactgactttaaatccgtcggtgcattggtcattttgtgattttgtcgtcttaatactgaatgttttcgacattgtgtggcgacgaatatccagcaaattaaatttaccaaaatcaatcacctgtgtttccggtgaaatggaaaaattgacgctgcaatccagcacgcgaatgttttccagaccagtaatatgatatttcaggttttgggcagtagggtcttcgttaacgctaccggcaccgtcaaattgcacgacgatatagtcgctaagcgtactttgataatcatgcggcggcatttctcgtattttgacgtataaccgcatgcgagcgagaaaggtacgcgacatgtgaatattagcgggatcacccgagcaaattttgttctgccatcccatcgcgataatctgctcaggggtataaatgtcaatgttcttactgtcaatacactggttagtgtcgatgcggctttttccctggttggcgtcataatcaacgccattgtaagttacgccgagttgataatagcgatcctgcacccccgggtagggggttacccaggcataaacatgctcactttcaaaattgccgttggtattgttgtcacaatagacgggaattttaatatcgtcagattcccaaatcttatcgccgagtttggcattgcctggtacagcaaaaggttgaatcgcttctgatttttctaccgagccaccggatgaaccaaagtagcagttcagggcaagcgcagacttcaacggcagaaataacagacagatgacgagcaacactcccttgccagcactcatttcttcgcctccacggcttgtaaatggcattgtccgctgcagttgagcgtcgtcatgcgtaacgcgccgtaatcatccatataaccgagataaaactggctgccgctataatttccggtgtttgtgttgaccgtactaaaaggcgcaaccatcacggttttgaagccggggagaacgcctttttcatttcgtcccaggtaggcaatggtcagataatacgcggtaggatttttcagtgtcagttggttgccctgctggctgacctgtaactgcagttcgaccttttctcctgctttcttgcgtaatgcagccggtcgccagaacaccttgatacgactctgaatggcgacttgcagaacggcatggtcgctgtttttttccggggcgggaggaatttcacgcatattgtagaaaaatagcgtttcgcgatcgcccggtaattttgtggtcgaggcttgctttactatccgtacctgcgttgttgctttcggttccagacgttgtatcggcggcagggcgaccagaagatcatcgcttttctcccctttttcattttcgagccaggaataagcgaggtaggggagtttatcgctacgattatccacccgcagactggtagctttatcattagcgttaaacacaatacgagtgcgatcgggttgtagtgcagcgtggctgcacagactggcaaccaacaacaaaaggggtagtcctttcataaatgtcattttcatttccttaattaatgacaaggtaaaatcaggcgatttgcggtgtcttccatatgttcaggaagatggagcgagcaatgctggctatcaccccagaccacggtaaacttttgattttcagcgactccgcttaaccaggcatgtccttcctcgccaaccatccccacgctaatgccgctgtcatcctggcggatatccgctccgaggggaggaaactgaccgctggcgttgcgaatgatgacgttaacgtctttaccggaacgggaagccagtgatttgtaacctatcgcgccttcaatccacgtttctttgataacgttttctgcaactgttacgccgtcgggtaagtcattcatgttcaccgccacggtggaaggctggtaactggaaatcaacggcaccaccgcaatgccaaaatggttggtgtagtcgagattgccctgaaccggaatatctgccacgccatcggtgctgaccatcaggcgtggttcattggtggagctgcggcgatgaaacgctgcaccatattgggttgcggtgaaagaaccgctccagctgctgctgacggaactgtaatcattggcggcataggtaccagaaatatcccactcacccgctgaactcaggtgctgatagttaccgctcacctgggctccattgtcaggacggtcggattgcagtccggcagacatgccccagctattacgttcatccagcgtatcgttccacgacatgcggtgtgtggtgctgtggctactgttttgcatgtcatagccaacccgaccaccgttaccgaaggggagcgaaatcgacaggtaaatctggttgtcgtgatctttatcttcgtaatgggttgtattgaatgacgtcgaaatagagatatctctccagtcaccaatatcaacattaaaacctgccgtgatgttggcggtcgtggaggcgtctgcattccaccaggtttgatgtagcaggttggcgtaaagattgaggtttagtggggtaatcggttggcccacaataagctgatcgtctgtttttcgtcctgcgcatcgctgtcgttgtatttgtgatccagatagttggcgtagctgtgaaaatgacgatcggagaaacgataagcggcgagggaaatcgtgctgttagtggcatccacttgtttgctgtaattaaaacggtagcttaagccccgctcgtcctgctgagtatcaaaatggctactggcccacgtgacatcaaacgacagcgcaccaagccacagcatattttgcccaatacccattgcggcagaatggtagtcatcaccagaaagcagcaggccgccgtacagcgaggtgtttgacagcatcccccaggaaacttcattgctaaaaaaggtttcattttcagtttgatgtgacatggagggccgtggctgacccgcggccagtttatagcgaacctgtccctgacgagtcaggaagggcgtcgatgctgccgaaacctggaaattgttcacccgaccatcttcttccgtcactttgacatccagtgtgccctgaacagactgattaaggtcgtcaatgataaatgggcctggtgggacttttttctggtaaatgacgcggcctgattgactgatcgtcaccgtggcattggtctgtgcaataccgctaatttgtggggcgtagccgcgtagttcccatggcaacattcgctcgtcacttgccagtgccgcgccggtataagaaaaaccgtcgaaaatattggaactaaaatccgtttcgccgagggttaatttagagcctaattgcggtaatggacgaaaaagataggtgcgcgatattccgcctgactgttcatggttatcatcgctatcagtctgattcaactgataatcactacgtaagcgccatgccccggcgttaattccggtggtaccgtaggcgttcaggttagtgctgctgctgccgtcctgtgggcggtagctgctggcaaacaagttgtaatccatcaggataccggcgacaccttctttccatgtggagggtggggtccagttttctgagtgccacgccagccaggcttgcggaatactaatattcagttgctgattggcttgatcgaaattgaagagcatttcaggtcgggagctaaaatcgacgcactgatttatcaatggtaacgactgacggacttcaggttttaagccaaatttatcgaccagtaaatcattgatgcacggaatggttttatcgtcatttttgtgccagttaatcttttgcccgttactgatttggttattatttaccgcaacgctaacaaaatactcaccgggagcaatgactcctttttcctttaataatgaaatatcaatgcggtcgcgcatcgatttatcgagaacattaaggttgaattcgaccgccaatgcgcaaggcatcgccacgaccaggcaggatacaaaagagagtcgataaatattcacggtgtccatacctgataaatattttatgaaaggcggcgatagcgccgccaaagtaatacttatttataatccagcacgtaggttgcattcgccgtaactgcgcctggcgttacaggtgtagcctgatcaatttgttccatccaggcaaagaaattcagcgtttgttcgctggaggtcggagccaggtcgatatctggagtagcggtgcctaaaacgatattgctttgatctttattcattaaacgtacgccgacgccggtggcttcacccgtgctggtgttgttgagaatcggatctgcgccggtggttttcgctgagctatcaaaggtgactgcaactttagaaatcttgccaccggaaccgttgctggagttttccagatcacagttgactaagcgcaggtcgacagcaacggcatcgctgtgatgtgactgattaatgtggctggtggtcacctgaccgagttcaacctctttatcaatatcatcctgatgtatttcacacggtgcttcaataacttcacctttaaagtgaatttcaccggatccttcatcagccgcataaacaggtgctgtgaacagcagagatacggccagtgcggccaatgttttttgtcctttaaacataactgagtcctttaacagaaaagaaaaaagtatatcggtgcaagaatatcttatttgattgtcgaatgtttttagtttttcttaaaaatattattaattttattaaatgtaaaagtaattaattgatggtatgaattaaatgtttgatgaataaagtattggaaattataggggtgcgctatatttggtggtttattcatgtaactgagaggaagatagatgattaaaaatcatcgatttgtttataatttataccgatatattttttttagaatatatgaatgtccgatagtggattttatttttacaattttttgtgtttgggcatataaaaattaacccgccatttgaacggcgggttaaaatatttacaacttagcaatcaaccattaacgcttgatatcgcttttaaagtcgcgtttttcatatcctgtatacagctgacgcggacgggcaatcttcataccgtcactgtgcatttcgctccagtgggcgatccagccaacggtacgtgccattgcgaaaatgacggtgaacatggaagacggaatacccatcgctttcaggatgataccagagtagaaatcgacgttcgggtacagtttcttctcgataaagtacgggtcgttcagcgcgatgttttccagctccatagccacttccagcaggtcatctttggtgcccagctctttcagaacttcatggcaggtttcacgcattacggtggcgcgcgggtcgtaatttttgtacacgcggtgaccgaagcccatcaggcggaaagaatcatttttatctttcgcacgacgaacaaattccggaatgtgtttaacggagctaatttcttccagcattttcagcgccgcttcgttagcaccaccgtgcgcaggtccccacagtgaagcaatacctgctgcgatacaggcaaacgggttcgcacccgaagagccagcggtacgcacggtggaggtagaggcgttctgttcatggtcagcgtgcaggatcagaatacggtccatagcacgttccagaatcggattaacttcatacggttcgcacggcgtggagaacatcatattcaggaagttaccggcataggagagatcgttgcgcggataaacaaatggctgaccaatggaatacttgtaacacatcgcggccatggtcggcattttcgacagcaggcggaacgcggcaatttcacggtgacgaggattgttaacatccagcgagtcgtgatagaacgccgccagcgcgccggtaataccacacatgactgccattggatgcgagtcgcgacggaaagcatggaacagacgggtaatctgctcgtggatcatggtatgacgggtcaccgtagttttaaattcgtcatactgttcctgagtcggtttttcaccattcagcaggatgtaacaaacttccaggtagttagaatcggtcgccagctgatcgatcgggaaaccgcggtgcagcaaaataccttcatcaccatcaataaaagtaattttagattcgcaggatgcggttgaagtgaagcctgggtcaaaggtgaacacaccttttgaaccgagagtacggatatcaataacatcttgacccagcgtgcctttcagcacatccagttcaacagctgtgtccccgttgagggtgagttttgcttttgtatcagccatttaaggtctccttagcgccttattgcgtaagactgccggaacttaaatttgccttcgcacatcaacctggctttacccgtttgttatttggctcgccgctctgtgaaagaggggaaaacctgggtacagagctctgggcgcttgcaggtaaaggatccattgatgacgaataaatggcgaatcaagtacttagcaatccgaattattaaacttgtctaccactaataactgtcccgaatgaattggtcaatacttccacactgttacataagttaatcttaggtgaaataccgacttcataacttttacgcattatatgcttttcctggcaatgtttgtaacaactttgttgaatgattgtcaaattagatgattaaaaattaaataaatgttgttatcgtgacctggatcactgttcaggataaaacccgacaaactatatgtaggttaattgtaatgattttgtgaacagcctatactgccgccaggtctccggaacaccctgcaatcccgagccacccagcgttgtaacgtgtcgttttcgcatctggaagcagtgttttgcatgacgcgcagttatagaaaggacgctgtctgacccgcaagcagaccggaggaaggaaatcccgacgtctccaggtaacagaaagttaacctctgtgcccgtagtccccagggaataataagaacagcatgtgggcgttattcatgataagaaatgtgaaaaaacaaagacctgttaatctggacctacagaccatccggttccccatcacggcgatagcgtccattctccatcgcgtttccggtgtgatcacctttgttgcagtgggcatcctgctgtggcttctgggtaccagcctctcttcccctgaaggtttcgagcaagcttccgcgattatgggcagcttcttcgtcaaatttatcatgtggggcatccttaccgctctggcgtatcacgtcgtcgtaggtattcgccacatgatgatggattttggctatctggaagaaacattcgaagcgggtaaacgctccgccaaaatctcctttgttattactgtcgtgctttcacttctcgcaggagtcctcgtatggtaagcaacgcctccgcattaggacgcaatggcgtacatgatttcatcctcgttcgcgctaccgctatcgtcctgacgctctacatcatttatatggtcggttttttcgccaccagtggcgaactgacatatgaagtctggatcggtttcttcgcctctgcgttcaccaaagtgttcaccctgctggcgctgttttctatcttgattcatgcctggatcggcatgtggcaggtgttgaccgactacgttaaaccgctggcattgcgcctgatgctgcaactggtgattgtcgttgcactggtggtttacgtgatttatggattcgttgtggtgtggggtgtgtgatgaaattgccagtcagagaatttgatgcagttgtgattggtgccggtggcgcaggtatgcgcgcggcgctgcaaatttcccagagcggccagacctgtgcgctgctctctaaagtcttcccgacccgttcccataccgtttctgcgcaaggcggcattaccgttgcgctgggtaatacccatgaagataactgggaatggcatatgtacgacaccgtaaaagggtcggactatatcggtgaccaggacgcgattgaatatatgtgtaaaaccgggccggaagcgattctggaactcgaacacatgggcctgccgttctcgcgtcttgatgatggtcgtatctatcaacgtccgtttggcggtcagtcgaaaaacttcggcggcgagcaggcggcacgcactgcggcggcggctgaccgtaccggtcacgcactgttgcacacgctttatcagcagaacctgaaaaaccacaccaccattttctccgagtggtatgcgctggatctggtgaaaaaccaggatggcgcggtggtgggttgtaccgcactgtgcatcgaaaccggtgaagtggtttatttcaaagcccgcgctaccgtgctggcgactggcggggcagggcgtatttatcagtccaccactaacgcccacattaacactggcgacggtgtcggcatggctatccgcgcaggcgtaccggtgcaggatatggaaatgtggcaattccacccgaccggcattgccggtgcgggcgtactggtcaccgaaggttgccgtggtgaaggcggttatctgctgaacaaacatggcgaacgctttatggagcgttatgcgccgaacgccaaagacctggcgggccgtgatgtggtggcgcgttccatcatgattgaaatccgtgaaggtcgcggctgtgatggtccgtgggggccacacgcgaaactgaaactcgatcacctgggtaaagaagttctcgaatcccgtctgccgggtatcctggagctttcccgtacctttgctcacgtcgatccggtgaaagagccgattccggttatcccaacctgtcactacatgatgggcggtattccgaccaaagtgaccggtcaggcgctgacggtgaacgagaaaggcgaagatgtggttgttccggggctgtttgccgttggtgaaatcgcttgtgtatcggtacacggcgctaaccgtctgggcggcaactcgctgctggacctggtggtctttggtcgtgcggcaggtctgcatctgcaagagtctatcgccgaacagggcgcattgcgcgatgccagcgagtctgatgttgaagcatctctggatcgtctgaaccgctggaacaataatcgtaacggtgaagatccggtggcgattcgtaaagcgctgcaagaatgtatgcagcataacttctcggtcttccgtgaaggtgatgcgatggcgaaagggcttgagcagttgaaagtgatccgcgagcgtctgaaaaatgcccgtctggatgacacttccagcgagttcaacacccagcgcgttgagtgcctggaactggataacctgatggaaacggcgtatgcaacggctgtttctgccaacttccgtaccgaaagccgtggcgcacatagccgcttcgacttcccggatcgtgatgatgaaaactggctgtgccactccctgtatctgccagagtcggaatccatgacgcgccgaagcgtcaacatggaaccgaaactgcgcccggcattcccgccgaagattcgtacttactaatgcggagacaggaaaatgagactcgagttttcaatttatcgctataacccggatgttgatgatgctccgcgtatgcaggattacaccctggaagcggaagaaggtcgcgacatgatgctgctggatgcgcttatccagctgaaagagaaagatcccagcctgtcgttccgccgctcctgccgtgaaggtgtgtgcggttccgacggtctgaacatgaacggcaagaatggtctggcctgtattaccccgatttcggcactcaaccagccgggcaagaagattgtgattcgcccgctgccaggtttaccggtgatccgcgatttggtggtagacatgggacaattctatgcgcaatatgagaaaattaagccttacctgttgaataatggacaaaatccgccagctcgcgagcatttacagatgccagagcagcgcgaaaaactcgacgggctgtatgaatgtattctctgcgcatgttgttcaacctcttgtccgtctttctggtggaatcccgataagtttatcggcccggcaggcttgttagcggcatatcgtttcctgatcgatagccgtgataccgagactgacagccgcctcgacggtttgagcgatgcattcagcgtattccgctgtcacagcatcatgaactgcgtcagtgtatgtccgaaggggctgaacccgacgcgcgccatcggccatattaagtcgatgttgttgcaacgtaatgcgtaaaccgtaggcctgataagacgcgcaagcgtcgcatcaggcaaccagtgccggatgcggcgtgaacgccttatccggcctacaagtcattacccgtaggcctgataagcgcagcgcatcaggcgtaacaaagaaatgcaggaaatctttaaaaactgcccctgacactaagacagtttttaaaggttccttcgcgagccactacatagacaagagctcgcaagtgaaccccggcacgcacatcactgtgcgtggtagtatccacggcgaagtaagcataaaaaagatgcttaagggatcacgatgcagaacagcgctttgaaagcctggttggactcttcttacctctctggcgcaaaccagagctggatagaacagctctatgaagacttcttaaccgatcctgactcggttgacgctaactggcgttcgacgttccagcagttacctggtacgggagtcaaaccggatcaattccactctcaaacgcgtgaatatttccgccgcctggcgaaagacgcttcacgttactcttcaacgatctccgaccctgacaccaatgtgaagcaggttaaagtcctgcagctcattaacgcataccgcttccgtggtcaccagcatgcgaatctcgatccgctgggactgtggcagcaagataaagtggccgatctggatccgtctttccacgatctgaccgaagcagacttccaggagaccttcaacgtcggttcatttgccagcggcaaagaaaacatgaaactcggcgagctgctggaagccctcaagcaaacctactgtggcccgattggtgccgagtatatgcacattaccagcaccgaagaaaaacgctggatccaacagcgtatcgagtctggtcgcgcgactttcaatagcgaagagaaaaaacgcttcttaagcgaactgaccgccgctgaaggccttgaacgttacctcggcgcaaaattccctggcgcaaaacgcttctcgctggaaggcggtgacgcgttaatcccgatgcttaaagagatgatccgccacgctggcaacagcggcacccgcgaagtggttcttgggatggcgcaccgtggtcgtctgaacgtgctggtgaacgtgctgggtaaaaaaccgcaagacttgttcgacgagtttgccggtaaacataaagaacacctcggcacgggtgacgtgaaataccacatgggcttctcgtctgacttccagaccgatggcggcctggtgcacctggcgctggcgtttaacccgtctcaccttgagattgtaagcccggtagttatcggttctgttcgtgcccgtctggacagacttgatgagccgagcagcaacaaagtgctgccaatcaccatccacggtgacgccgcagtgaccgggcagggcgtggttcaggaaactctgaacatgtcgaaagcgcgtggttatgaagttggcggtacggtacgtatcgttatcaacaaccaggttggtttcaccacctctaatccactggatgctcgttctacaccgtactgtactgatatcggtaagatggttcaggcaccgattttccacgttaacgcggatgatccggaagccgttgcctttgtgacccgtctggcgctcgatttccgtaacacctttaaacgtgatgtcttcatcgacctggtgtgctaccgccgtcacggccacaacgaagccgacgagccgagcgcaacccagccgctgatgtatcagaaaatcaaaaaacatccgacaccgcgcaaaatctacgctgacaagctggagcaggaaaaagtggcgacgctggaagatgccaccgagatggttaacctgtaccgcgatgcgctggatgctggcgattgcgtagtggcagagtggcgtccgatgaacatgcactctttcacctggtcgccgtacctcaaccacgaatgggacgaagagtacccgaacaaagttgagatgaagcgcctgcaggagctggcgaaacgcatcagcacggtgccggaagcagttgaaatgcagtctcgcgttgccaagatttatggcgatcgccaggcgatggctgccggtgagaaactgttcgactggggcggtgcggaaaacctcgcttacgccacgctggttgacgaaggcattccggttcgcctgtcgggtgaagactccggtcgcggtaccttcttccaccgccacgcggtgatccacaaccagtctaacggttccacttacacgccgttgcaacacatccataacgggcagggcgcgttccgcgtctgggactccgtactgtctgaagaagcagtgctggcgtttgaatacggttatgccaccgcagaaccacgcactctgaccatctgggaagcgcagttcggtgacttcgccaacggtgcgcaggtggttatcgaccagttcatctcttctggcgaacagaaatggggccggatgtgtggtctggtgatgttgctgccgcacggttacgaagggcaggggccggagcactcctccgcgcgtctggaacgttatctgcaactttgtgctgagcaaaacatgcaggtttgcgttccgtctaccccggcacaggtttaccacatgctgcgtcgtcaggcgctgcgcgggatgcgtcgtccgctggtagtgatgtcgccgaaatccctgctgcgtcatccgctggcggtttccagcctcgaagaactggcgaacggcaccttcctgccagccatcggtgaaatcgacgagcttgatccgaagggcgtgaagcgcgtagtgatgtgttctggtaaggtttattacgacctgctggaacagcgtcgtaagaacaatcaacacgatgtcgccattgtgcgtatcgagcaactctacccgttcccgcataaagcgatgcaggaagtgttgcagcagtttgctcacgtcaaggattttgtctggtgccaggaagagccgctcaaccagggcgcatggtactgcagccagcatcatttccgtgaagtgattccgtttggggcttctctgcgttatgcaggccgcacggcctccgcctctccggcggtagggtatatgtccgttcaccagaaacagcaacaagatctggttaatgacgcgctgaacgtcgaataaataaaggatacacaatgagtagcgtagatattctggtccctgacctgcctgaatccgtagccgatgccaccgtcgcaacctggcataaaaaacccggcgacgcagtcgtacgtgatgaagtgctggtagaaatcgaaactgacaaagtggtactggaagtaccggcatcagcagacggcattctggatgcggttctggaagatgaaggtacaacggtaacgtctcgtcagatccttggtcgcctgcgtgaaggcaacagcgccggtaaagaaaccagcgccaaatctgaagagaaagcgtccactccggcgcaacgccagcaggcgtctctggaagagcaaaacaacgatgcgttaagcccggcgatccgtcgcctgctggctgaacacaatctcgacgccagcgccattaaaggcaccggtgtgggtggtcgtctgactcgtgaagatgtggaaaaacatctggcgaaagccccggcgaaagagtctgctccggcagcggctgctccggcggcgcaaccggctctggctgcacgtagtgaaaaacgtgtcccgatgactcgcctgcgtaagcgtgtggcagagcgtctgctggaagcgaaaaactccaccgccatgctgaccacgttcaacgaagtcaacatgaagccgattatggatctgcgtaagcagtacggtgaagcgtttgaaaaacgccacggcatccgtctgggctttatgtccttctacgtgaaagcggtggttgaagccctgaaacgttacccggaagtgaatgcttctatcgacggtgatgacgtggtttaccacaactatttcgacgtcagcatggcggtttccacgccgcgcggcctggtgacgccggtactgcgtgatgtcgataccctcggcatggcagacatcgagaagaaaatcaaagagctggcagttaaaggccgtgacggcaagctgacggttgaagatctgaccggtggtaacttcaccatcaccaacggtggtgtgttcggttccctgatgtctacgccgatcatcaacccgccgcagagcgcaattctgggtatgcacgctatcaaagatcgtccgatggcggtgaatggtcaggttgagatcctgccgatgatgtacctggcgctgtcctacgatcaccgtctgatcgatggtcgcgaatccgtgggcttcctggtaacgatcaaagagttgctggaagatccgacgcgtctgctgctggacgtgtagtagtttaagcttcacctgcactgtagaccgacgtggatagggtgtcggtctacggtttaaaagataacgattactgaaggatggacagaacacatgaacttacatgaatatcaggcaaaacaactttttgcccgctatggcttaccagcaccggtgggttatgcctgtactactccgcgcgaagcagaagaagccgcttcaaaaatcggtgccggcccgtgggtagtgaaatgtcaggttcacgctggtggccgcggtaaagcgggcggtgtgaaagttgtaaacagcaaagaagacatccgtgcttttgcagaaaactggctcggcaagcgtctggtaacgtatcaaacagatgccaatggccaaccggttaaccagattctggttgaagcagcgaccgatatcgctaaagagctgtatctcggtgccgttgtagaccgtagttcccgtcgtgtggtctttatggcctccaccgaaggcggcgtggaaatcgaaaaagtggcggaagaaactccgcacctgatccacaaagttgcgcttgatccgctgactggcccgatgccgtatcagggacgcgagctggcgttcaaactgggtctggaaggtaaactggttcagcagttcaccaaaatcttcatgggcctggcgaccattttcctggagcgcgacctggcgttgatcgaaatcaacccgctggtcatcaccaaacagggcgatctgatttgcctcgacggcaaactgggcgctgacggcaacgcactgttccgccagcctgatctgcgcgaaatgcgtgaccagtcgcaggaagatccgcgtgaagcacaggctgcacagtgggaactgaactacgttgcgctggacggtaacatcggttgtatggttaacggcgcaggtctggcgatgggtacgatggacatcgttaaactgcacggcggcgaaccggctaacttccttgacgttggcggcggcgcaaccaaagaacgtgtaaccgaagcgttcaaaatcatcctctctgacgacaaagtgaaagccgttctggttaacatcttcggcggtatcgttcgttgcgacctgatcgctgacggtatcatcggcgcggtagcagaagtgggtgttaacgtaccggtcgtggtacgtctggaaggtaacaacgccgaactcggcgcgaagaaactggctgacagcggcctgaatattattgcagcaaaaggtctgacggatgcagctcagcaggttgttgccgcagtggaggggaaataatgtccattttaattgataaaaacaccaaggttatctgccagggctttactggtagccaggggactttccactcagaacaggccattgcatacggcactaaaatggttggcggcgtaaccccaggtaaaggcggtactacccacctcggcctgccggtgttcaacaccgtgcgtgaagctgttgctgctactggcgctaccgcttctgttatctacgtaccagcaccgttctgcaaagactccattctggaagctattgatgcaggcatcaaactgattatcaccatcactgaaggcatcccgacgctggatatgctgactgtgaaagtgaaactggacgaagccggcgttcgtatgatcggcccgaactgcccgggcgttatcactccgggtgaatgcaaaatcggtatccagccgggtcacattcacaaaccgggtaaagtgggtatcgtttcccgttccggtacactgacctatgaagcggttaaacagaccacggattacggtttcggtcagtcgacctgtgttggtatcggcggtgacccgatcccaggctctaactttatcgacatcctcgaaatgttcgaaaaagatccgcagaccgaagcgatcgtgatgatcggtgagatcggcggtagcgctgaagaagaagcggcagcgtacatcaaagagcacgttaccaagccagttgtaggttacatcgctggtgtgactgcgccgaaaggcaaacgtatgggccacgcgggtgcgatcattgctggtgggaaagggactgcggatgagaaattcgctgctctggaagccgcaggcgtgaaaaccgttcgcagcctggcggatatcggtgaagcactgaaaactgttctgaaataaatatctgtaataagaaatagccctcgccgcttccctctacaggaatggcgaagggctgtcggtttcgacatggttggccatcgtatgatggccttttttgtgcttatcgcgatgattttcgctgcgctatcagggtaaatttatagtcatcggtattaaaagcgttgcggctatattcaaacacccgaccatcaactaaatatccacgcgatactttttcaagaatcggctttgtctggctgatattaagcagacggctcatctcttcggttggcatcagaggaatgatttcctgttcgctacgatcgataaccatcttcttcacttcttcaataaagtgatatttcgaattttccatgacctgccaggtgagatccgggaacaacgcaagcggcatccaggtttcttccagcgccattggcttttgcttgcgatagcgcacgcgcttcacatgccacacacgatcctgcgcggtgatttgtagctgttgctgaagaaaatcgtcagccggaatcacttcaaatatcaggatttcactgtgtgtatcgacgtgacggtccgacagtttttcatcaaaactggttaactgaaaaatatcgtaattgacccgctcttctttgacgtaagtcccgctgccctgaatgctttcgaggatctgctgctcgactagctggcgcaaagcctgacgcaccgtaacccggctgacgccaaactctgtttgtagcgctgattcagtgggtaacgcatcgccaggtttaagctcgccacgcgcaatttgttcacgaatgcgatcggcaatctgccggtataagggcttgtgtcccatttttagtatctcattaatacgaatttagccattatgcccgataaattcatcctgtaaataatacaaatacaatacaaataatttcaatcaagtgaaattgatcacatgatggtattgttttatcgggcacactggcgcgactataaaaacgatcaagtgaggatcatgatgaatctgacgactctgacccaccgcgatgcgttgtgtctgaatgcgcgctttaccagccgtgaagaggccatccacgcgttgactcaacgtcttgctgctctggggaaaatttccagtactgagcaatttctggaagaagtgtatcgccgtgaaagccttggcccgaccgccttaggtgaagggttggctgtgccgcatggcaaaactgctgcggtaaaagaagcggcgtttgcggtcgccacactcagcgagccgcttcagtgggaaggcgttgatggcccggaagcagttgatttagtggtgctgctggcgattccccccaatgaagcgggtactacgcatatgcaactgctgacagcgctgaccacgcgccttgcggatgatgagattcgggcgcgtatacagtcggcgacgacgcctgatgagttgctctcggcgctggatgacaagggaggcacgcaaccttctgcctctttttccaacgcgccaactatcgtctgcgtaacggcctgtccggcgggtattgctcacacctatatggctgcggaatatctggaaaaagccggacgcaaactcggcgtaaatgtttacgttgaaaaacaaggcgctaacggcattgaagggcgtttaacggcggatcaactcaatagtgcaaccgcctgtatttttgcggctgaagtcgccatcaaggagagtgagcgttttaatggcattcccgcgctttcagtgcctgttgccgagccgattcgccatgcagaagcgttgatccaacaagcgcttaccctcaagcgtagcgatgagacgcgtaccgtacagcaagatacgcaaccggtgaaaagtgtcaaaacggagctgaaacaggcactgttgagcggaatctcttttgccgtaccgttgattgtcgcggggggcacggtgctggcggtcgcggtattactgtcgcaaatcttcgggctacaagatctgtttaatgaagaaaactcctggctgtggatgtaccgcaagctgggcggcgggctgctcggaattttgatggtaccggtgctcgcggcctataccgcctattctctggcagataaaccggcgttagcgccaggctttgcggctggacttgccgccaacatgatcggctccgggtttctcggcgcggtcgttggcggattgatagccggttacttgatgcgctgggtgaaaaatcacttgcgtcttagcagtaaattcaatggattcctgactttttatctctacccggtgctcggtacgttgggagcgggcagtctgatgctgtttgtggtgggagaacctgtcgcatggatcaataactcgcttaccgcctggctgaacggtctgtcaggaagtaacgcgctgttgctgggtgccattctcggttttatgtgttcctttgaccttggagggccagtgaacaaagccgcttatgcattctgcctgggcgcaatggcgaacggcgtttacggcccgtatgccattttcgcctccgtcaaaatggtttcggcatttaccgtaaccgcttccacgatgctcgcaccgcgcctgtttaaagagtttgaaattgagaccgggaaatccacctggctgttagggctggcaggtattaccgaaggggcgatcccgatggcgattgaagatccgctgcgggttattggttcgtttgtgctgggctctatggtaacgggcgctattgtcggtgcgatgaatatcggcctttcgacacccggtgccggcattttctcgctctttttacttcatgataatggcgcgggcggtgttatggcggcaattggctggtttggtgcggcattggtgggggctgcaatctcgactgcaattctcctgatctggcggcgtcacgcggttaagcatggcaactatctgactgatggcgtaatgccataaacaaaaaggaaacgacgatgaaagcggtatctcgcgttcacatcaccccgcatatgcattgggatcgggagtggtatttcaccaccgaagagtcacgcattctgctggtcaataatatggaagagatcctgtgccgactggaacaggacaacgaatacaaatattacgtactcgacgggcaaacggcgatcctcgaagattatttcgcggtgaaaccggaaaacaaagaccgcgtgaagaaacaggtagaagccggtaagttgattatcggcccctggtatacccagaccgataccacgattgtttctgcggaatccatcgtccgtaatctgatgtacggaatgcgtgactgcctcgcgtttggcgagccgatgaaaataggttatttaccggattcctttggcatgtccgggcaactgccgcatatttacaatggatttggcattacccgcactatgttctggcgcggatgttcggagcgccacggtactgataaaaccgagtttttgtggcaaagcagtgacggtagcgaagtgacggcgcaggtgctgccgctgggctacgccatcggtaagtacttacctgccgacgaaaacggattacgtaaacgcctcgacagttattttgacgtgctggaaaaagcgtctgtaaccaaagagattttgctgccgaatggtcatgaccagatgccattgcagcaaaatatcttcgaagtgatggataagctacgtgagatctaccctcaacgtaagtttgtgatgagccgctttgaagaggtatttgagaagatcgaagcgcagcgtgaaagtctggccaccctgaaaggtgaatttatcgatggcaaatatatgcgcgtacatcgcaccatcggttccacgcgcatggatatcaaaattgcccacgcacgtattgaaaataagattgttaatctgctggaaccgctggcaacgctggcctggacgttgggttttgaataccaccacggcttgctggagaaaatgtggaaagagatcttaaaaaatcatgcccacgacagtatcggttgttgttgcagtgacaaagttcatcgcgaaattgtcgcccgcttcgaactggctgaagacatggcggataatctgctgcgtttctacatgcgcaaaattgccgataacatgccacagagtgatgccgacaaactcgtgctgtttaacctgatgccctggccgcgggaagaagttattaacaccactgtgcggctgcgcgccagccagtttaatctacaagacgatcgcggtcagcctgtaccgtattttattcgccatgcccgtgagatcgatcctggcctaatcgatcggcaaattgttcattatggcaattatgatccctttatggagtttgatattcagatcaaccagattgtcccttctatgggctatcgcacgctttatattgaagcgaatcagcctggcaacgtgattgcggcaaaaagtgacgctgaagggattctggaaaatgctttctggcagattgcgctcaatgaggatggttctctgcaactggtagataaagacagcggtgtgcgctatgaccgggtattgcaaattgaagaaagctctgatgatggtgatgaatatgactattcacccgcaaaagaagagtgggtaattaccgcagcgaacgcgaaaccgcaatgcgatattattcatgaagcctggcagagcagggctgttatccgctatgacatggcagtgccgctcaatttgtcagaacgcagcgcccggcaatccactggcagagtagggggggtgttggttgtcactcttagtcataacagcaggcgtattgatgtggatatcaaccttgataaccaggctgacgatcatcgccttcgtgtcctggtccctacaccttttaacactgacagtgttctggcagatacgcagtttggttcgctaacgcgccccgtgaacgacagtgcaatgaacaactggcagcaagaaggctggaaagaagcgccggttccggtatggaatatgctcaactatgttgccttacaggaagggcgtaacggcatggctgtctttagcgaagggttacgtgaatttgaagtcatcggtgaagagaagaaaacctttgccattacgttgctgcgtggcgtgggcttactgggcaaagaagatctgcttttaaggcctgggcggccttcgggaattaaaatgccagtcccggactcacaactacgtggtctgctttcttgtcgcctaagtttattgagttataccggtacgccaaccgccgctggtgtagctcagcaggcgcgagcatggctgactccagtacagtgttacaacaaaatcccatgggatgcgatgaagctcaacaaagccggattcaacgtgccggaaagttatagtttgttgaaaatgcccccagtgggatgcctgataagcgcacttaagaaagctgaagaccgacaagaagtgattttacggctgtttaatccggctgaatcagcaacctgtgatgcgactgttgctttcagtcgcgaggtgatttcttgctcagaaacgatgatggatgaacacattaccaccgaggaaaatcaaggttcaaatctatcggggccttttttacccggccagtcacggacgttcagttaccggcttgcctgaatagcaatcaaaccgaagccacatatgcgcggccagattgttgacaaagggcgctttgttcatgccggatacggcatgaacgctttattcggtctacaaaagcaggcaaattcaatatattgcagagatgatgtagacactggcaagcgtagcgcatcaggtaattttgcgtttatcttcactctcaagccacgtatatgtggctttatttttaacaaaataataaccctgggtgagttaattataatataattacaagttaattaaatgttaatatcggcggggtggatttatgcctttattagtaatcctgaaactctgcgtcgtattagccagtgaccaaaaaaagaattaaggtcaaccgtgctgtttttgcttcgtctctttttatctttaaattgccaaccgaaactaatttcagccttataactcacacattttaaacataaatgtcactaaagttaccttattgaaacatgattaacataatttgtaggaattgatatttatcaatgtataagtcttggaaattggcatcaaaaagagataaattgttctcgatcaaattggctgaaaggcggtaatttagctataaattgatcaccgtcgaaaaatgcaaatttgcttcaacaaaaacctgtttattgtaaggattttgcggcgtaatatatacgtgggatcaatttgagtttttattaacatgtttgcaacctttctttacgccgtttttgtgtgcattcacatggtatgatgaaagtgttcaaacaaatttctattggggcatgcgtgtgaccctttctaacggggttcactctcggagtcttcatgcgatgagcaaggagtcatgatgttagatatagtcgaactgtcgcgcttacagtttgccttgaccgcgatgtaccacttcctttttgtgccactgacgctcggtatggcgttcctgctggccattatggaaacggtctacgtcctctccggcaaacagatttataaagatatgaccaagttctggggcaagttgtttggtatcaacttcgctctgggtgtggctaccggtctgaccatggagttccagttcgggactaactggtcttactattcccactatgtaggggatatcttcggtgcgccgctggcaatcgaaggtctgatggccttcttcctcgaatccacctttgtaggtctgttcttcttcggttgggatcgtctgggtaaagttcagcatatgtgtgtcacctggctggtggcgctcggttcaaacctgtccgcactgtggattctggttgcgaacggctggatgcaaaacccaatcgcgtccgatttcaactttgaaactatgcgtatggagatggtgagcttctccgagctggtgcttaacccggttgctcaggtgaaattcgttcacactgtagcgtctggttatgtgactggcgcgatgttcatcctcggtatcagcgcatggtatatgctgaaaggtcgtgacttcgccttcgctaaacgctcctttgctatcgctgccagcttcggtatggctgctgttctgtctgttattgttctgggtgatgaatccggctacgaaatgggcgacgtgcagaaaaccaaactggctgctattgaagccgagtgggaaacgcaacctgcgcctgctgcctttactctgttcggcattcctgatcaggaagaggagacgaacaaatttgcgattcagatcccttacgcactgggcatcattgcaacgcgttccgtggataccccggttatcggcctgaaagagctgatggtgcagcatgaagaacgcattcgtaacgggatgaaggcgtactctctgctcgaacaactgcgttctggttctaccgaccaggcggttcgtgaccagttcaatagcatgaagaaagacctcggttacggtctgctgctgaaacgctatacgccaaacgtggctgatgcgactgaagcgcagattcaacaggcaaccaaagactccatcccgcgtgtagcgccgctgtactttgcgttccgtatcatggtggcgtgtggcttcctgcttctggcaatcatcgcgctctctttctggagtgtcatccgcaaccgcattggcgagaaaaaatggcttctgcgcgccgcgctgtacggtattccgctgccgtggattgctgtagaagcgggctggttcgtggctgaatatggccgccaaccgtgggctatcggtgaagtgctgccgacagctgtggcgaactcgtcactgaccgcaggcgatctcatcttctcaatggtgctgatttgcggcctgtataccctgttcctggtggcagaattgttcttaatgttcaagtttgcacgcctcggcccaagcagcctgaaaaccggtcgctatcactttgagcagtcttccacgactactcagccggcacgctaagacaggagtcgtcaaatgatcgattatgaagtattgcgttttatctggtggctgctggttggcgttctgctgattggttttgcagtcactgacggtttcgacatgggggtgggcatgctcacccgtttcctcggtcgtaacgacaccgagcgtcgaattatgattaactccattgcaccacactgggacggtaaccaggtttggctgatcaccgcgggcggcgcactctttgctgcctggccgatggtctatgccgctgcgttctccggcttctatgtggcgatgatcctcgtgctggcgtctttgttcttccgtccggtcggttttgactaccgctccaagattgaagaaacccgctggcgtaacatgtgggactggggcatcttcattggtagtttcgttccgccgctggtaattggtgtagcgttcggtaacctgttgcagggcgtaccgttcaacgttgatgaatatctgcgtctgtactacaccggtaacttcttccagttgcttaacccgttcggcctgctggcaggcgtggtgagcgtagggatgatcattactcagggcgcaacctatctgcaaatgcgtaccgtgggcgaactgcacctgcgtacccgtgcaacggctcaggtggctgcgctggtgacactggtctgtttcgcactggctggcgtatgggtgatgtacggtatcgatggttatgtcgtgaaatcgacaatggaccattacgcagcctctaacccactgaataaagaagtggttcgtgaagctggcgcatggctggttaacttcaacaacacgccaattctgtgggctattccggcactgggtgtggttcttccgctgctgaccatcctgactgcacgtatggataaagccgcgtgggcgtttgtgttctcctccctgacgctggcctgcatcatcctgacagccggtatcgcaatgttcccgtttgtgatgccgtccagcaccatgatgaacgcaagtctgacaatgtgggatgcaacttccagccagctgacgcttaacgtcatgacctgggttgcggtggttctggtaccgatcattctgctctacaccgcttggtgttactggaaaatgttcggtcgtatcaccaaagaagatattgaacgtaacacccactctctgtactaagtaaggagctaaaaatgtggtatttcgcatggattctgggaacgcttcttgcctgttcgtttggggtaatcaccgcgctggcgcttgaacacgtcgaatcaggcaaagccggtcaagaagacatctgatgagtaagattatcgcgaccttgtatgcggtaatggacaagcgccccctgcgggcgctttccttcgtgatggcgcttctgttagcaggatgtatgttttgggacccatctcgttttgccgcgaagaccagtgaactggaaatctggcatggtttattgctgatgtgggccgtctgtgctggtgtgattcacggcgtgggctttcgtccgcagaaggttctttggcaagggattttttgcccattgcttgccgatattgttctcattgtcgggctgattttcttcttcttttaaatcagaattctctttaaaaaattatgggccgctccaggcccataaatttttacgctcccttaacttgccctcattcccaaacctcaatcgcgcgcgtatagtagcagcgtttaaaagctctaacttttgttgcattaccgggatgtaaagtgaatacaacgctgtttcgatggccggttcgcgtctactatgaagataccgatgccggtggtgtggtgtaccacgccagttacgtcgctttttatgaaagagcacgcacagagatgctgcgtcatcatcacttcagtcagcaggcgctgatggctgaacgcgttgcctttgtggtacgtaaaatgacggtggaatattacgcacctgcgcggctcgacgatatgctcgaaatacagactgaaataacatcaatgcgtggcacctctttggttttcacgcaacgtattgtcaacgccgagaatactttgctgaatgaagcagaggttctggttgtttgcgttgacccactcaaaatgaagcctcgtgcgcttcccaagtctattgtcgcggagtttaagcagtgactgacatgaatatccttgatttgttcctgaaggctagccttctggttaaacttatcatgttgattttgattggtttttcaatcgcatcctgggccattattatccagcggacccgtattcttaacgcagcggcgcgcgaagccgaagcgtttgaagataaattctggtctggaatcgaactctctcgcctctatcaagagagtcaggggaaacgggataatctgactggttcggaacaaatattttacagcgggttcaaagagtttgtgcgcctgcatcgtgccaatagccatgcgccggaagccgtagtggaaggggcgtcgcgtgctatgcgtatctccatgaaccgtgaacttgaaaatctggaaacgcacattccgttcctcggtacggttggctccatcagcccgtatattggtctgtttggtacggtctgggggatcatgcacgcctttatcgccctcggggcggtaaaacaagcaacactgcaaatggttgcgcccggtatcgcagaagcgttgattgcgactgcaattggtctgttcgccgcaattccggcggtaatggcttataaccgcctcaaccagcgcgtaaacaaactggaactgaattacgacaactttatggaagagtttaccgcgattctgcaccgccaggcgtttaccgttagcgagagcaacaaggggtaagccatggccagagcgcgtggacgaggtcgtcgcgatctcaagtccgaaatcaacattgtaccgttgctggacgtactgctggtgctgttgctgatctttatggcgacagcgcccatcatcacccagagcgtggaggtcgatctgccagacgctactgaatcacaggcggtgagcagtaacgataatccgccagtgattgttgaagtgtctggtattggtcagtacaccgtggtggttgagaaagatcgcctggagcgtttaccaccagagcaggtggtggcggaagtgtccagccgtttcaaggccaacccgaaaacggtctttctgatcggtggcgcaaaagatgtgccttacgatgaaataattaaagcactgaacttgttacatagtgcgggtgtgaaatcggttggtttaatgacgcagcctatctaaacatctgcgtttcccttgcttgaaagagagcgggtaacaggcgaacagtttttggaaaccgagagtgtcaaaggcaaccgaacaaaacgacaagctcaagcgggcgataattatttcagcagtgctgcatgtcatcttatttgcggcgctgctctggagttcgttcgatgagaatatagaagcttcagccggaggcggcggtggttcgtccatcgacgctgtcatggttgattcaggtgcggtagttgagcagtacaaacgcatgcaaagccaggaatcaagcgcgaagcgttctgatgagcagcgcaagataaaggaacagcaggctgctgaagaactgcgtgagaaacaagcggctgaacaggaacgcctgaagcaacttgagaaagagcggttagctgctcaggaacagaaaaagcaggctgaagaagccgcaaaacaggccgagttaaagcagaagcaagcggaagaggcggcagcgaaagcggcggcagatgctaaagcgaaggccgaagcggatgctaaagctgcggaagaagcagcgaagaaagcggcggcagacgcgaagaaaaaagcagaagcagaagccgccaaagccgcagccgaagcgcagaaaaaagccgaggcagccgctgcggcactgaagaagaaagcggaagcggcagaagctgctgcagctgaagcaagaaagaaagcggcagcagagaaagctgcagccgacaaaaaagcagcagaaaaagcggctgctgataaggcagcagctgataagaaagcagcggcagaaaaagccgccgcagacaaaaaagcggcagcggcaaaagcagcggcagaaaaagccgccgcagacaaaaaagcggcagcggcaaaagcagcagctgaaaaagccgctgcagcaaaagctgccgcagaggcagatgatattttcggtgagctaagctctggtaagaatgcaccgaaaacggggggaggggcgaaagggaacaatgcttcgcctgccgggagtggtaatactaaaaacaatggcgcatcaggggccgatatcaataactatgccgggcagattaaatctgctatcgaaagtaagttctatgacgcatcgtcctatgcaggcaaaacctgtacgctgcgcataaaactggcacccgatggtatgttactggatatcaaacctgaaggtggcgatcccgcactttgtcaggctgcgttggcagcagctaaacttgcgaagatcccgaaaccaccaagccaggcagtatatgaagtgttcaaaaacgcgccattggacttcaaaccgtaatcgcgatgttgactgttccgacggtcaacatcaggcaccggttgccacggggttctggtagttttgtgtattttagtttgttaacattctgctaaattatcgtgggccatcggtccagataagggagatatgatgaagcaggcattacgagtagcatttggttttctcatactgtgggcatcagttctgcatgctgaagtccgcattgtgatcgacagcggtgtagattccggtcgtcctattggtgttgttcctttccagtgggcgggccctggtgcggcacctgaagatattggcggcatcgttgctgccgacttgcgtaacagcggtaaatttaatccgttagatcgcgctcgtctgccacagcagccgggtagtgcgcaggaagtacaaccagctgcatggtccgcgctgggtattgacgctgtagttgtcggtcaggtcactccgaatccggatggttcttacaatgttgcttatcaacttgttgacactggcggcgcaccgggtactgtacttgctcagaactcgtacaaagtgaacaagcagtggctgcgctatgctggtcataccgccagtgatgaagtgtttgaaaaactgaccggcattaaaggtgcgttccgtacccgtattgcctacgttgttcagaccaacggcggtcagttcccgtatgaactgcgcgtatctgactatgacggttacaaccagtttgtcgttcaccgttcaccacagccgctgatgtccccggcgtggtcaccagacggttctaaactggcttatgtgaccttcgaaagcggtcgttccgcgctagttatccaaacgctggcaaacggcgctgtacgtcaggtggcttcattcccgcgtcacaacggtgcgcctgcattctcgccagacggcagcaaactggcattcgccttgtcgaaaaccggtagcctgaacctgtacgtaatggatttggcttctggtcagatccgccaggtgactgatggtcgcagtaacaataccgaaccgacctggttcccggacagccagaacctggcatttacttctgaccaggccggtcgtccacaggtttataaagtgaatatcaacggcggtgcgccacaacgtattacctgggaaggttcgcagaaccaggatgcggatgtcagcagcgacggtaaatttatggtaatggtcagctccaacggtgggcagcagcacattgccaaacaagatctggcaacgggaggcgtacaagttctgtcgtccacgttcctggatgaaacgccaagtctggcacctaacggcactatggtaatctacagctcttctcaggggatgggatccgtgctgaatttggtttctacagatgggcgtttcaaagcgcgtcttccggcaactgatggacaggtcaaattccctgcctggtcgccgtatctgtgataataattaattgaatagtaaaggaatcattgaaatgcaactgaacaaagtgctgaaagggctgatgattgctctgcctgttatggcaattgcggcatgttcttccaacaagaacgccagcaatgacggcagcgaaggcatgctgggtgccggcactggtatggatgcgaacggcggcaacggcaacatgtcttccgaagagcaggctcgtctgcaaatgcaacagctgcagcagaacaacatcgtttacttcgatctggacaagtacgatatccgttctgacttcgctcaaatgctggatgcacatgcaaacttcctgcgtagcaacccgtcttacaaagtcaccgtagaaggtcacgcggacgaacgtggtactccggaatacaacatctccctgggtgaacgtcgtgcgaacgccgttaagatgtacctgcagggtaaaggcgtttctgcagaccagatctccatcgtttcttacggtaaagaaaaacctgcagtactgggtcatgacgaagcggcatactccaaaaaccgtcgtgcggtactggtttactaagagaattgcatgagcagtaacttcagacatcaactattgagtctgtcgttactggttggtatagcggccccctgggccgcttttgctcaggcaccaatcagtagtgtcggctcaggctcggtcgaagaccgcgtcactcaacttgagcgtatttctaatgctcacagccagcttttaacccaactccagcaacaactttctgataatcaatccgatattgattccctgcgtggtcagattcaggaaaatcagtatcaactgaatcaggtcgtggagcggcaaaagcagatcctgttgcagatcgacagcctcagcagcggtggtgcagcggcgcaatcaaccagcagcgatcaaagcggtgcggcggcatcaacgacgccgacagctgatgctggtactgcgaatgctggcgcgccggtgaaaagcggcgatgcaaacacggattacaatgcagctattgcgctggtgcaggataaatcccgccaggatgacgcaatggtggcatttcagaatttcatcaaaaattaccctgattcaacttacctgccaaacgccaattattggctgggtcagttaaactacaacaagggtaaaaaagatgatgcggcgtactattttgcttcggtagtgaaaaactatccgaagtcaccaaaggctgctgatgcgatgtttaaagtcggcgtcatcatgcaggacaaaggtgacaccgcaaaagcgaaagccgtataccagcaggttatcagtaaataccctggtactgatggcgctaaacaggcacaaaaacgtctgaacgcgatgtaatgcataacacacgaccagaagtcgcattatttctggtcgtgtcgtgcgaatcataagcagttgagtgatctgcatcgaaatttttgttgcgctcaagtctgaaatcagtaatatatgccgccgttgccacgggatatcaaacaaaccgaaagcaacgaaaaagtgggtcgttagctcagttggtagagcagttgacttttaatcaattggtcgcaggttcgaatcctgcacgacccaccagttttagcatcgaagacagatgttaagcgtgtaggataacgttgcgtcagcaacggcccgtagggcgagcgaagcgagtcatcctgcacgacccaccactaattacggtgggttcggtggaagtagtttgtagtatccagcgcagtatcgggtgattagctcagctgggagagcacctcccttacaaggagggggtcggcggttcgatcccgtcatcacccaccactcgggtcgttagctcagttggtagagcagttgacttttaatcaattggtcgcaggttcgaatcctgcacgacccaccaattttaacatcaaactcagatgttaagcgtgaaggataacgttgcgccagcaacggcccgtagggcaagcgaagcgagtcatcctgcacgacccaccaatcttaaagattggccccgagtagaaatctttcaggtaacacccgtatgggtcgttagctcagttggtagagcagttgacttttaatcaattggtcgcaggttcgaatcctgcacgacccaccatcctgaatgattaaagcagcataatcccgcaaggggtcgttagctcagttggtagagcagttgacttttaatcaattggtcgcaggttcgaatcctgcacgacccaccaatgtaaaaaagcgccctaaaggcgcttttttgctatctgagatattcaaagattcgaacctgcagcaggttcgagttgagcgcagcgaaacaacggagccgctcgcggcgacggcccgaagggcgagcgaagcgagtcatcctgcacgacccaccaatgtaaaaaagcgccctaaaggcgcttttttgctatctgagatattcaaagattcgaacctgcagcaggttcgagttgagcgcagcgaaacaacggagccgctcgcggcgacggcccgaagggcgagcgaagcgagtcatcctgcacgacccaccaatgtaaaaaagcgccctaaaggcgcttttttgctattcaggcatcctcaatttcactttgtaaacctgatgacatcgtcagagcttactgtgcaagcaactctacgtcggtggaattaggcgtaattcgagtgacttttccccaccattcgactatcttgtttagcatataaaacaaattacgccgatagtagcgaatattacgctaatgtcggttttaacgttaagcctgtaaaacgagatggtaagatgagcgtgatgtttgatccagacacggcgatttatcctttccccccgaagccgacgccgttaagcattgatgaaaaagcgtattaccgcgagaagataaaacgtctgctaaaagaacgtaatgcggtgatggttgcccactactataccgaccccgaaattcaacaactggcagaagaaaccggtggctgtatttctgattctctggaaatggcgcgcttcggtgcaaagcatcccgcttctacgttgttagtcgctggggtgagatttatgggagaaaccgccaaaattctcagtccggaaaaaacaattctgatgctgacacttcaggctgaatgttcactggatctcggctgccctgttgaagaatttaacgcattttgcgatgcccatcccgatcatactgtcgtcgtctacgccaacacttctgctgcggtaaaagcgcgcgcagattgggtggtaacttcaagcattgccgtcgaacttattgatcatctggatagttttggtgaaaaaatcatctgggcacccgacaaacatctggggcgttacgtgcaaaaacagacgggcgcagacattttatgctggcagggtgcctgtattgtgcatgatgaatttaagactcaggcgttaacccgcttgcaagaagaatacccggatgctgccatactggtgcatccagaatcaccacaagctattgtcgatatggcggatgcggtcggttccaccagtcaactgatcgctgctgcgaaaacattgccacatcagcggcttatcgtggcaaccgatcggggcattttctacaaaatgcagcaggcggtgccagataaagagttactggaagcaccaaccgcaggtgagggtgcaacctgccgcaggtgtcagcgccagtgatataagacggtaattcgccatttggattgtccgctccacccaacatgttgtttccttaaggttctcacaccagaaaggacatcaacatgctgagcagagaggacttttacatgataaagcaaatgcgccagcagggcgcgtacatcgttgatattgcgactcagattggttgctctgaacggacggtcagacgctacctcaaataccctgaaccgccagccagaaagacccgccacaaaatggttaagctgaaaccgtttatggattacatcgacatgcgcctggcagagaatgtctggaatagcgaggttatcttcgcggagattaaggcaatgggttatacgggcggacgttccatgctgcgttactacatccagcccaaacgtaaaatgcgtccgtcaaaaagaacagttcgcttcgaaactcagcctggataccagctccagcatgactggggcgaagttgaggtggaggttgccgggcaacggtgcaaagttaactttgcggttaatacgctggggttctcccgcagcttccatgtcttcgccgcaccaaaacaggatgctgagcatacctacgaatcactggttcgcgccttccgctacttcggtggttgtgtgaaaacggtgctggttgataaccagaaggctgcggtgctgaagaataacaacgggaaagtcgtgttcaactccggattcctgttgctggctgaccactataacttcctgccacgggcatgccgtccacgcagggccagaacaaaaggtaaggttgagcggatggtgaaatacctcaaggagaacttcttcgtccggtaccgcaggttcgacagcttcactcatgtcaatcaacaactggagcaatggatagccgatgtggctgacaaacgggagcttcgccagttcaaagaaacgccggaacagcgcttcgcgctggagcaggaacatctgcagccgttaccggatacagacttcgataccagttacttcgatatccgccatgtgtcctgggacagctatatcgaggttggtggtaatcgttacagcgttcccgaagcgctgtgtggtcagccggtatcgatacgaatatcgctggatgacgagttgcggatctacagtaatgagaaactggtggcctcacatcgcctctgttcagcatcgtctggctggcagacagtgccggagcatcacgccccgctctggcagcaggtcagtcaggtggaacatcgaccactgagtgcctatgaggagctgttgtgatgcatgaactggaagtcctgctgagtcgcctgaaaatggagcatctgagttatcacgttgaaagcctgctggaacaggcagctaaaaaagagctgaactaccgggagttcctgtgcatggcgctacagcaggaatggaacggcaggcatcagcgcggtatggagtccaggctgaagcaggctcgtctgccgtgggtcaaaacgctggagcagttcgactttaccttccagccgggcatcgaccgtaaggttgtccgggaactggctggtctggcgttcgtggagcgcagcgaaaacgtgatcctgctgggccctcctggtgtcggaaaaactcatctggccatagctcttggcgtgaaagcggtggatgcgggacatcgggtactgtttatgccactggacagactgatcgcgacactgatgaaagcgaaacaggaaaaccggctggagcgtcagctacagcaactgagttatgcccgggtgttgatcctggatgaaataggctatctgccgatgaacagagaggaagccagtctgttcttccggctactgaaccgtcgatatgaaaaagcgagcatcatactgacgtcaaacaaagggttcgcagactggggagaaatgttcggagatcacgtactggcaacagcgatcctggatcggctgctacatcactcaaccacgctgaatatcaaaggagagagttaccggttaaaagagaaacgtaaagctggagtgctgaccaaaaacacaacgccaatcagtgatgatgaaatggtggaaagcggacagcatcagtaacgaaagtatttagcgggcatgaaaatggcaaataacggtcaaacatcgtggcgttgacacagctgcgcgcattgtccgtggatggccatgaatggccttcagtccatcgcagaggcattagaacaggaaggaagcaatcacgaggttcttgatgaaaggctgcgagagagggcgctggtgccgctcaatcgtatgctggattttgcggctacactacgtggataacgaataataaggcgtaacgttacgctttgggggaaagatggatttttttagtgtgcagaatatcctggtacatataccaataggggcaggcggttatgatctctcatggatcgaagcggtaggcacgatcgccgggttgctgtgtattggccttgccagtctggagaagatcagcaactacttctttggcctgatcaacgtcaccttgtttggcattattttctttcagattcagctgtatgccagcctgctattacaggtgtttttctttgccgcgaatatttacggttggtatgcgtggtcgcgacaaaccagtcagaacgaggcggagttgaaaattcgctggttaccattgccgaaggcgctcagctggttggcggtttgcgttgtttcgattggtctgatgacggtatttatcaatccggtgtttgcatttttgacccgcgtggcagtcatgatcatgcaagcattaggattacaggttgtgatgcctgaactgcaaccggacgctttcccgttctgggattcatgcatgatggtgttatctatcgtggcaatgattctgatgacgcgtaagtatgtggaaaactggctgttgtgggtgattattaacgtgattagcgtcgttatttttgcacttcagggcgtttacgccatgtctctggagtacatcatcctgacctttattgcgctcaacggcagtcggatgtggatcaacagcgcacgtgaaagaggctcacgcgcgctgtcccattaatggtgatgatgtgaatggccagacaccccttcattcaggtggcagtctggcccatgacaaggttgatattccatctgaatggtggcgtgctcaatctgatagtgatccatcaggtagtgttggatctgatccaacaaggcatcgtgatcgtgtggcgggatcacctgcacatgcagcgttatcaccggcttctcgcctaccatccatacatgtacatggtgcacattgcggacttccgggatttcccggcacatacgacgcttcagttcagcgatatccagcgataccggtgcaccttcaagtaattcattcacgctatctttcaacagtcgccacgcgctacgcagaaccagaagcgacaccactatcgagagaatggggtcagcaggtgtccagccggtccagataataatcaacgcggcaataatagccccaaccgaacccaacaggtccccgagcacatgcaatgccgctgctcgtacgttgaggtttttctcttcgctgccgtgatgaagtaaccagaaagaaagtatatttgccagcaacccagccacggcaattgccatcatcatgccgccctcgaccggacgcggcgtgcggaagcgttctatcgcctcccagacaatcaaaatggtaattaccacgagggcgatggcattcacaaacgccgcgagcgtggtcagtcttagccaaccgaaagtgtggcgaatggtgggaggacgacgtgaaaattgcacggcgagtagggcgaaaagcagggcggcagtatcggtcaacatatgacccgcatcggccagcaatgccagagaaccagaaagaaaaccaccaacgacttctaccagcataaacccggcagtcacgccgaaagcatacaacaagcgacgagcattattatcttctggcaggtgtgaggacgtgtgtgagtgtgagtgcgccatgacgagtcatcccttaattattctcacttaactttatgacatcatactgcttttagaagtgaaaaattaaaagggagagactccgctctcccattattggctattttgcagggttactgcgtggtaccgtcggttttggtatcgacatcattattgatgccatcaccgatttgtacctttttattgatatccggacatcgaccatctttgcacatggtgttcttgtgctcttcatctttggtcattccgtcattgttcattgaagaaccatccgaatgcagcattgtgccgccagaaccggtatttaccccgttattgtcgacgttatttggcgcgacattttcacgggcgtcaggggctacctggcccgcatcagctgcggcgtttgcctggccgttattagtttgcgctccgctatcggcagccagtgcggcaccgctggcaaggcttagagtggcagtcagaaataatgtggccagttttgtcattttcataggatgctcctgttatggtcgttatgtcggataacctcttccaacagtgcatttgcaggtgaatataaggcattggtttaagatttcagccagtttatgaaacgcagcagagaatcttgaaataattaacaaacaaaggagttacagttagaaattgtaggagagatctcgtttttcgcgacaatctggcgtttttcttgctaattccaggattaatccgttcatagtgtaaaaccccgtttacacattctgacggaagatatagattggaagtattgcattcactaagataagtatggcaacactggaacagacatgaattatcagaacgacgatttacgcatcaaagaaatcaaagagttacttcctcctgtcgcattgctggaaaaattccccgtaactgaaaatgccgcgaatacggttgcccatgcccgaaaagcgatccataagatcctgaaaggtaatgatgatcgcctgttggtggtgattggcccgtgctcaattcatgatcctgtcgcggctaaagagtatgccactcgcttgctggcgctgcgtgaagagctgaaagatgagctggaaatcgtaatgcgcgtctattttgaaaagccgcgtaccacggtgggctggaaagggttgattaacgatccgcatatggataacagcttccagatcaacgacggtctgcgtatagcccgtaaattgctgcttgatattaacgacagcggtctgccagcggcgggtgagtttctcgatatgatcactcctcagtatctcgctgacctgatgagctggggcgcaattggtgcacgtaccacggaatcgcaggtgcaccgcgaactggcgtctggtctttcttgtccggtaggttttaaaaatggcacagacggtacgattaaagtggctatcgatgccattaatgccgccggtgcgccgcactgcttcctgtccgtaactaaatgggggcattcggcgattgtgaataccagcggtaacggtgattgccatatcattctgcgcggcggtaaagagcctaactacagcgcgaagcacgttgctgaagtgaaagaagggctgaacaaagcaggcctgccagcacaggtgatgatcgatttcagccatgctaactcgtccaaacaattcaaaaagcagatggatgtttgtgctgacgtttgccagcagattgccggtggcgaaaaggccattattggcgtgatggtggaaagccatctggtggaaggcaatcagagcctcgatagcggggagccgctggcctacggtaagagcatcaccgatgcctgcattggctgggaagataccgatgctctgttacgtcaactggcgaatgcagtaaaagcgcgtcgcgggtaaggtttaattgtcggatgcgccgtcagagtggcgtatccgatgaatcaccacaggcctgataagacgcgcagcgtcgcatcaggcaatgtgctccattgttagcaacaaaaaagccgactcacttgcagtcggctttctcatttttaaacgaatgacgtttacttcgctttaccctggttagcaaccgccgctgctttcgctgcgatctcgtcagcattacccagataatagcgtttcagcggtttgaaattctcgtcgaactcatacaccagcggcacgccggtcgggatattcagctcaagaatctcttcttcactcatgttatcaagatatttcaccagcgcacgtaaagagttaccgtgtgcagcgatgatcacgcgctcaccgctcttcatacgcggtagaatagtttcattccagtaagggatcacgcggtcaatggtcagcgccaggctttcagtcagcggcagctctttctcgctcagtttcgcgtaacgcggatcgtgacccggataacgctcatcatctttagtcagttccggcggagtcacggcaaaaccacgacgccattgtttcacctgctcgtcgccatacttttcggcggtttccgctttgttcagaccctgcaacgcaccgtagtgacgttcgttcagtttccaggatttctcaacgggcagccatgcctgatccagttcgtccagcacattccacagggtatggatagcgcgtttcagcacagaagtgtaagcaaagtcaaagctgtaaccttcctctttcagcagcttacctgctgcttttgcttcgcttacgcctttctcagacagatccacgtcgtaccaaccggtgaaacggttttctttgttccactgactttcgccatgacgaaccagaaccagcttagttacagccatatacttactcctcaaattatctttttatgataataattctcattatattgccgtgacgaagcaacagcaatgcttacgcataaccatagcgaaaatagtggcgcagtgtaaggttgttgtgaatattgagttgcaaatatgtcggtgtttgctggtgatttgaacaatatgaagataaagccctcatgacgagggcttaacattactcagcaataaactgatattccgtcaggctggaatactcttcgccaggacgcaggaagcagtccggttgcggccattcagggtggttcgggctgtccggcagaaactcgctttccaacgccagtccttgccagtcggcgtaaggttcggttccccgcgacggtgtgccgccgaggaagttgccggagtagaattgaagagcgggagcggtggtgtagaccttcagctgcaatttttcatctgctgaccagacatgcgccgccactttcttgccatcgcctttggcctgtaacaagaatgcgtgatcgtaacctttcactttgcgctgatcgtcgtcggcaagaaactcactggcgatgattttggcgctgcggaaatcaaaagaggttccggcgacagatttcaggccgtcgtgcggaatgccgccttcatcaaccggcagatattcgcccgccagaatctgcaacttgtgattgcgcacgtcagactgctcgccgtcaagattgaaatagacgtgattagtcatattcaccgggcaagatttatcaactgtggcgcgataagtaatggagatacggttatcgtcggtcagacgatattgcaccgtcgcgccgagattacccgggaagccctgatcgccatcatctgaactcagggcaaacagcacctgacgatcgttctggttcacaatctgccagcgacgtttgtcgaacccttccgggccgccgtgtagctggttaacgccctgacttggcgaaagcgtcaccgtttcaccgtcaaaggtataacggctattggcgatgcggttggcataacgaccaatagaggcccccagaaacgcggcctgatcctgatagcattccgggctggcacagccgagcagcgcctcgcggacgctgccatcggaaagcggaatacgagctgaaagtaaagtcgcaccccagtccatcagcgtgactaccatccctgcgttgttacgcaaagttaacagtcggtacggctgaccatcgggtgccagtgcgggagtttcgttcagcactgtcctgctccttgtgatggtttacaaacgtaaaaagtctctttaatacctgtttttgcttcatattgttcagcgacagcttgctgtacggcaggcaccagctcttccgggatcagcgcgacgatacagccgccaaatccgccgccggtcatgcgtacgccacctttgtcgccaatcactgctttgacgatttctaccagagtgtcaatttgcggcacggtgatttcgaaatcatcgcgcatagaggcatgagactccgccatcaactcgcccatacgtttcagatcgccttgctccagcgcgctggcagcttcaacggtgcgggcgttttcagtcaggatatgacgcacgcgtttcgccacgattgggtccagctcatgtgcaacagcgttgaactcttcaatggtgacatcgcgcagagctggctgctggaagaaacgcgcaccggtttcgcactgttcacgacgggtgttgtattcgctgccaaccagggtacgtttgaagttactgttgatgatgacgacagccacacctttcggcatggaaactgctttagtccccagtgagcggcagtcaatcagcaaggcatgatctttcttgccgagtgcggaaattagctgatccatgatcccgcagttacagccaacaaactggttttctgcttcctgaccgttaagcgcgatttgtgcgccgtccagcggcagatgataaagctgctgcaatacggttccgaccgcgacttccagtgaagcggaagaacttaacccggcaccctgcggcacattgccgctgatcaccatgtccacaccgccgaagctgttgttacgcagttgcagatgtttcaccacgccacgaacgtagttcgcccattgatagttttcatgcgcgacaatgggcgcattgagggaaaactcgtcgagctgattttcataatcggctgccatcacgcgaactttacggtcatcgcgtggtgcacagctgatcacggtttgataatcaatcgcgcagggcagaacgaaaccgtcgttgtagtcggtgtgttcaccaatcaaattcacgcggccaggcgcctgaatggtgtgagtggcagggtagccaaatgcgttggcaaacagagattgtgttttttctttcagactcatttcttacactccggattcgcgaaaatggatatcgctgactgcgcgcaaacgctctgctgcctgttctgcggtcaggtctcgctgggtctctgccagcatttcataaccaaccataaatttacgtacggtggcggagcgcagcagaggcggataaaagtgcgcgtgcagctgccagtgttgattctcttcgccattaaatggtgcgccgtgccagcccatagagtaggggaaggagcactggaagaggttgtcataacgactggtcagctttttcaacgccagcgccaaatcgctgcgctgggcgtcggtcaaatcggtgatccgcaaaacgtgggctttgggcagcagtagcgtttcgaacggccaggcagcccagtaaggcacaacggctaaccagtgttcggtttcgacaacggtacggctaccgtctgccagctcgcgctgaacataatccaccagcattggtgatttctgttcggcaaaatattctttttgcaggcggtcttcgcgctcagcttcgttaggcaggaagctatttgcccaaatctgtccgtgcggatgcgggttagagcagcccatcgccgcacctttgttttcaaagacctgcacccacgggtacgtttttcccagctctgcggtttgctcctgccaggttttgacgatttccgtcaatgccgcaacgctcagttctggcaacgttttactgtgatccggtgaaaagcagatcacccggctggtaccgcgcgcgctctggcaacgcatcaaaggatcgttgctttctggcgcatctggcgtgtcagacatcaaggccgcaaagtcattagtgaaaacgtaagtcccggtgtaatcggggtttttatcgcctgtcacccgcacattacctgcgcagaggaagcaatctggatcgtgcgcaggtaacacctgtttggctggcgtttcctgcgccccctgccaggggcgcttagcgcggtgcggtgaaaccagaatccattgcccggtgagcgggttgtagcggcgatgtggatgatcaacgggattaaattgcgtcatggtcgttccttaatcgggatatccctgtggatggcgtgactgccagtgccaggtgtcctgcgccatttcatcgagtgtgcgcgttacgcgccagttcagttcacggtcggctttgctggcgtccgcccagtaggccggaaggtcgccttcgcgacgcggtgcaaaatgatagttaaccggtttgccgcaggctttgctgaaggcattaaccacgtccagcacgctgctgcctacgccagcaccgaggttgtagatgtgtacgcctggcttgttcgccagtttttccatcgccacgacgtgaccgtccgccagatccattacgtggatgtaatcgcgtacgccagtaccatcttcggtcggataatcgttaccaaaaatcgccagcgagtcgcgacggcctacagcaacctgggcgatgtatggcatcaggttattcggaatgccttgcggatcttcgcccatatcgcccgacggatgcgcgccaaccgggttgaagtagcgcagcagggcaatgctccagtccggctgggctttttgcaggtcggtgaggatctgttccaccatcaatttgcttttgccataagggctttgcggtgtgccggtcgggaagctttcaacgtatggaattttgggctgatcgccataaacggtggcggaggagctaaaaataaagtttttgacgttagcggcgcgcatggcgctaatcaggcgcagagtgccgttgacattgttgtcgtaatattccagcggtttttgtaccgattcgccgacggctttcagcccggcgaagtggatcacggtgtcgatagcgtgatcgtgcagtatctcggtcatcaacgcttcgttacgaatatcgccttcaacaaacgttggatgtttgccgcctaagcgctcgataacaggcagtacgctgcgcttactgttacagaggttatcaagaatgatgacatcatgaccgttttgcagtaattgcacgcaggtatgacttccaatgtaaccgctaccaccggtaaccagaactctcataattcgctccattaggcttatggtatgaaataaccatagcataacaaagatgcgaaaagtgtgacatggaataaattagtggaatcgtttacacaagaatttagccgttttttatgcgcgattaagtgattataaaacagagggtttatgaatgattgcgctttttatctgaaaaaagaagcggtttcatgcctgcatgcgtcgaaccgttggccggagagggcgcttaggccgcctccggcaaggtcagcactaccgactcaatatatttttgtcagcacatagcgatagagtccaccgtccggcacgaactcaaggcgatgggtaatacaggcaggcgcatcttcagcgtggtgcgaaacaaataacaattgcgtttcaccttcgctaatcagcacatcaacaaaacggcggataagctggcgattgagcggatcaagcccctgtagtggttcatcgagaataagcaacgtcggatgtttcaccagtgcgcggacgatcagcgccagacgctgctgtccccaggaaagactatggaacggagcgtcagccgtacgtttatcaatgccgagaatatccagccactgctgcaccagtttttgctggcgatccgaaacggcctgataaatgccaatcgaatcaaaatagccagaaagaatcacattacgcacggtagtgctgacccggtaatccagatgcaaactactgctgacgtaaccgatatgctttttgatatcccagatggtttcgccgctgccgcgacgtcgtccgaaaagcgtcaaatcgttgctgtaaccttgcggatgatcgccagtaaccaggcttaataacgtcgattttcctgcaccatttggcccgacaatttgccagtgttcacctggattcacctgccagctaaggttattaagaatggggcgatcgttataagaaaccacgccattgttcagcacaatgcgcggttcgttggcgggtaaggcgtgacgtgctgaaggttcatccggctccggcagttgcacaccttcaagctgttcactatgcgccagttgcgcgacgagtgcttgttggagcagttcctctttagcgccagtttccgctaacgtgcaatccgccagcacgccagcaaactggacaaactccgggatctcatcgaagcgattgagcaccagtaccagagtaataccggactgatgtaacgaggcgagtcgctcagccagctgctgacgtgaggcaacatccaggccatcgaacgactcatcaagaatcaacaagtcaggctccgacatcagcgcctgacacagcagggtttttcgcgtctcgccagtggaaaggtatttaaagcgtcggtcgaggagggcggtaataccgaactgctgcgccagttgcatgcaacgcggtgcatcctttacttcatcctgaatgatttcagccgtagtgcgtccggtgtcatcttcgccagggccgagcatatcggtgttattccgctgccattcgtcgctgacgagtttttgcaattgctcgaaggagagacgagtgatgtgggaaaactggctttgccgttcacctttcaaaagcggaagttcccccgccagcgcgcgggccagggccgatttcccgcttccattcgaaccgacaaacgcccaactatcacccgcgtttaacgttagctgaggcaattgcagcgtttttgtgtcgctaagacgaaacgtgccttgcaaaatttgcaacgatgacattttatatcccattttgtgcagcgattactgacagggatacgtgtttcataacaaattgtcaacacgcttagcacagcgtggcgataatcacgctgtcggcattaaagtaggccgtgacattctgcccttgctgaagagaagtcgcttcatttaccggcactgtggcgcacagtgtttgcccgtcgggtagcgccattaatacttcgcactgctctgcgccgcgctcaatatgactaataatacccggtaattggttgtcggcgttttgtgcgaccgcttcgtcctgagtaatgcctacccacggcgcttttagcaatatcaacacttctttgccttcatccagccccagacgtgcgccgctttgtgcggtaattgcgactttcaggcgtgtttttccgtcagccagtaagacatcaacatgctgttgaatgtcatcatgatcgcgggcggtgatggtaccgaaccactggttacgggcgctggtttgcagtgaaaaacgtgagatcgcggccagcaggctgttcagcggcagggcgtcatcgtcacttaacacatcaaaggctttttgctggatttgcgccagtaagtcatagagctgaatcagtcgctgaccatagcgggtcagtactgcgccgccgccacctttaccgcctgttgcgcgctcaaccagaatatgctcgcttaactgattcatctcgttaatggcatcccaggcgcttttatagctgataccggcatctttcgctccctggctaatggaaccggaaagcgcaatgtgttttagtagcgaaatccggcgcgggtcggcgaataatttttgttggagcttaagggtgagaaggatttcggcctgcataacaatgtcctggcaaaagtcttattgtgacggaaaacgaacgccacgcaaagctgaccgcacaaaaggggagtgcttttctgtgcttagcggttagaatagtctcatgactatatctggagttgaccatgttagagttattaaaaagtctggtattcgccgtaatcatggtacctgtcgtgatggccatcatcctgggtctgatttacggtcttggtgaagtattcaacatcttttctggtgttggtaaaaaagaccagcccggacaaaatcattgattccctgaatgcccgcttagtcgggcatttctttttctcaacttcctgcttttccagccgatattttttcttatctacctcacaaaggttagcaataactgctgggaaaattctgagctagccgttatattgtcacctatataacgttacattaaggggttaccaatggctcgtaaatggttgaacttgtttgccggggcggcactctctttcgctgttgctggcaatacactggcagatgaagggaaaatcacggtgttcgccgccgcatcactgactaacgcaatgcaggacattgctacgcagtataaaaaagaaaaaggcgtggatgtggtttcttctttcgcttcgtcatctactctggcccgtcagattgaagcgggagcgcctgcggatctgtttatctctgccgatcagaaatggatggattatgcggttgataaaaaagcgatcgatacggcttcgcgccagacactgctcggcaatagcctggtcgttgtagcaccgaaagccagcgagcagaaagatttcatcatcgacagcacaactaactggacttcgctgctgaatggcggtcgcctcgcggttggcgatccggaacatgtccctgctggcatttatgcaaaagaagcactgcaaaaactgggcgcatgggatacgctctccccgaaactggctccggcggaagatgttcgtggcgcgctggcgttggtcgaacgcaatgaagcgccgttgggcattgtttacggttctgacgcagttgtcagcaaaggggtaaaagtggttgccaccttcccggaagattcacataaaaaagtggaatatccggttgctgttgtggaagggcataacaatgcgacagtgaaagcattttatgattatctgaagggaccgcaggcagcggaaatctttaaacgttacggatttacaaccaagtaatgatactgaccgatccagaatggcaggcagttttattaagcctgaaagtttcttccctggctgtgctgtttagcctgccgtttgggatcttttttgcctggttactggtgcgttgcacgtttccgggcaaagctctgctcgacagcgtactgcatctaccgctggtgttaccgcccgtggtcgtcggttacttattattagtttcgatgggacggcgcggatttatcggtgaacgtctgtatgactggtttggtattaccttcgcctttagctggcgcggcgcggttctcgctgccgccgtcatgtcgtttccgctgatggtgcgggcaattcgtctggcgctggaaggggttgatgtcaaactcgaacaggccgcaagaacactaggtgccgggcgctggcgcgttttctttactatcacgttaccgctgaccttaccgggaattattgttggtacggtactggcttttgctcgttctctcggtgagtttggtgcaaccatcacctttgtgtcgaacattcctggcgaaacgcgaaccattccctctgccatgtataccctgatccagacccccggcggggaaagtggcgcggcgagactgtgcattatttctattgcgctggcgatgatctccctgttgatttcagaatggctggccagaatcagccgtgaacgggcggggcgctaatcatgctggagctgaatttttcccagacgttgggcaaccattgcctgaccattaatgaaacactgcccgccaatggcatcactgctatctttggcgtctccggtgccggaaaaacttcgctgattaacgccatcagtggactgacgcgcccgcaaaaagggcggattgtcctcaatgggcgggtactaaatgatgccgaaaaaggtatctgcctgacgccggaaaagcgtcgcgttggctatgtttttcaggatgcgcggctgttcccgcattacaaagtgcgtggcaatctgcgctacggcatgtcgaaaagtatggtcgatcagttcgataagctggtggcgcttttaggcattgaaccgttgcttgaccgtttaccaggcagcctgtccggaggcgaaaaacagcgcgtggcgattggtcgggctttgctgacagcaccggaattgctgttgctggatgaaccgctggcgtcactggatattccgcgtaaacgcgaactgttgccttatctgcaacggctgacacgggaaatcaacattccgatgttgtatgtcagccattcgctggatgagatcctccatctggcagacagagtgatggtactggaaaacggtcaggtgaaagcctttggcgcgctggaggaagtgtggggcagtagcgtgatgaatccgtggctgccgaaagagcaacaaagtagcattctgaaagtgacggtacttgagcatcatccgcattacgcgatgaccgcgctggcgctgggcgatcagcatttgtgggtcaataagctggacgaaccgctgcaagctgcgctacgtatccgcattcaggcttccgatgtttctctggttttacaaccgccgcagcaaaccagcattcgtaacgtattgcgggcaaaagttgttaatagttatgacgacaacggccaggtggaagtggagctggaagtcggcggtaaaacgctgtgggcgcgtatcagcccgtgggccagggatgaactggcgatcaaacctggcctgtggctgtacgcgcaaattaaaagtgtgtcgataaccgcctgattaaatcaggtggctataaatgaactgggcaatgctgtcggtggtgttatcaccaatcacaatgttggcgcgcgcttttaccgcgtcatttaagaattttcgtctgcgcgaatggtacaccgataccactatcggacaaaattctgcgttttaattcagcattcaccgccaaaagcgactaattttagctgttacagtcagttgctaaatgcaaaggagcattcatgaagcaaatgcccattaggaattaatcatttataatcaattaattacaagtggtgtttcgaaatcattcgaaattaattctaaatgtctttccattccctccctcgtccgtcacggtatttatccgtcatgctggatgaacgatgtccaaggagcgcctgagtgaaatcaccgcctttttctgctgagtgcaggcgaccggataaacttcggatttcatgaaatggcggtgggtcaccttcccatttcaatccggatgtgtctcgggcaatcctgaactgtgctgcgattgtcctggctgtcttccctccgagtaacttttcgtttttaccgtttatttttttcaagttatccagtacatcggcaagtgttaaattcaatctggaaatcgtggtggggagagaaatgcgaatttttgcccctgttttttgttgttccacgtatagcctgccatctcttatatcctcccatctcatagccgccagatctccttcgcgctgtcctgttaccagtgcaagatccatgcaaaggccgaactgaggtagcctgagtttaacggacactccttcctgaaatagaatggcatcagaaggagctaataatgagcagaaaaacccaacgttactctaaagagttcaaagccgaagctgtcagaacggttcttgaaaatcaactttcgatcagtgaaggcgcttcccgattatctcttcctgaaggcactttaggacaatgggttaccgccgccagaaaagggctcggtactcctggttcccgcacggtggctgaactggaatctgaaattctgcaactgcgtaaggcgttaaatgaagctcgccttgagcgagatatattaaaaaaagcaacagcgtattttgcacaggagtcgctgaaaaatacgcgttaatcgaacaatggcgacaacaatttcccattgaagcgatgtgtcaggtatttggtgtatccaggagcggttattacaactgggtacagcatgaaccctcagacagaaaacaaagtgatgagcggctaaaactggagattaaggtggcacatatccgcactcgcgaaacatatggaacccggcggctccagacggagctggcagagaatggcatcatcgttggtcgtgaccgactggcacgtcttcgtaaggagctaaggctacgctgtaagcagaaacgcaagttcagagcgactacgaactcgaaccacaatctgccagttgcgccaaatctgctgaaccagacgttcgctcctacagcaccaaatcaggtctgggtggcggacctgacgtatgttgccacacaggagggatggttgtacctcgctggcatcaaagatgtttatacgtgcgaaattgtcggctacgccatgggagagcgcatgacaaaagagctgacaggtaaagccctgtttatggcgctcaggagccagcgcccacctgccgggctaatccaccactctgatcgaggttcacagtactgcgcatacgattaccgggtcatacaggagcagtctggtctgaaaacatcaatgtcgcgtaaaggtaactgttacgacaacgctccgatggaaagcttctggggaacgctgaaaaatgagagcctgagccactatcgttttaataaccgggatgaagccatctcagtaatacgggaatacattgagattttctacaatcgtcagcgtcgtcactctcgtctggggaatatctccccggcagccttcagggaaaaatatcatcagatggctgcttaaaaaaagaacaaatggtagtgtccgctattgccagtacacctcaaaccattcgttctggacgtctgctattttcctgattaacagatactcgtcaattaacagtcgactgcgcttcacttcagttctgaatggcctggttgcagaagctggatcttcttcggcaagaccagaagctatagctgttttaaaaatgtctgataaaagcgccctgtactggttagcaatagcaaatttactcccagctgctctgatttcaagaaagctgtacacctcccttatgcctatatttttaaccggaacaccaccaaagtattcacttatgattttcaacctctggttgtgtcttttcatggtgtttgtgcttaattgtctacgctctatttcatttctgaaatttaatatcagctcgcagaataatgttacgctattaccttttattctatccagtaagcttatatgttgcgtggataataattccatatttgccgcaatagcctcattaactgcaattcttttgtctcttccgattccaaactcccttcctgaacgtgggtcacgataactataatatccacctcgattgtaaagattgggtggtagatcacgtgtgtttgagtttcttcttcgtccggccatttctgattctctgcaaaagcccgccagtcgtttgaggtgtaattttttttgctgactcatgaaataaatattcacgcccatcctttatcggtggtggaaaaatcttacattctcgcacccagcggcgaaccgtttctgggcttcgtggacgtaactgacgggcgttccattctttgagtgtcaaatacatgtcatattcctgtaatatgaccgccagtaaatatacaaaatactggcgggcgtggttgatttttaataatcagctatgaagttctaattttgatataatgcaactcacgaggacagaagtttctcgcaattaaaatttatcagttttactttctgctctctggaaacgcctgcttcttttttccctgagagcattttttcgcattctgatttcgttagtttagattttgaatatcttgtccagctggcaggagaaccaccttccttttcaatagtggctgtaattttatacatgaacacctccattaatattttcaaaaaccgtgtccaaaatgcacttggttttacaccggaatattctcatcgtatcctgcttgttgcgtttcgttttgtgtttgtggatccgggaatgcatattcaacgccttccagttcaatccatagtgcattacgaccagctttgattgtcggccagtccatacctttgattctttcccatgagcgggaggtgaatgttttttccagcaaatcagcttttgcgcgtttggcgtcgttactggtgcccccatggtgcttgttgagcaactcgataatttcatcaagtgcgatttcttttgcacgcttttcttttagccatgtcggtgtaccgtcgttggcaaataattcactgttatcccgtgaggtatcgatgccgaggtgttcacctcccaggttaagaaactcgatatgaggaagaaagtttttaaatgttgggtttgaaaatacctgtccatcaatacgggtggagcgatcttttagtattctggcggtgcgccacacctgaccggtttctatgttcatttgcttctccatctggatcaggatggagggttcataaccggtttctgtttctgctttcatttttataccggtttttgccaactggcgtttgccatcatcaccttcgaaaaagtcatactcatatcctgcacgcccgcacataataatgtgcgcctgactgttaacaaatcgatcggtaaagcgtcgccactcctgtttgagccacgcccagtctgaaaattccagtcctcgtttacggtttcggcgtctggcatactcgtcgcataatccggtccagaagtgactgatggagtcgatgatcattacggaaccgctgctttccgcttcattaatggcttcaagcagatcaacaaacgagcgggtttttgccgtaaataattcgatattttccgcatcaaagcggggtttaacccagtcagagcctgtttctgtgtccagaaacattaccgggcggttaccagcttcaattccccgttgccgcataagcattaccagaccaatagccagttcgcttgctgtgtaggttttgccgtcgccagcaaaccccataattcctgcttttagataggcctgtgtgtttattgctcgttgaaaaagcgccatagattttagtcctccaaatcaatatcaacctggtggtgggcaatggtttcagccatgtaccggatgtgttctgccatgcgctcctgaaactcaacatcatcatcaaatgcgtggctgattgcctgtttattggcaccgtggcgttgcaaatggtcgatgcagagcgattcaaacaggtgctgaggcagacctttttccaggtcgtccgccagttccgtttctttttcttcacgaacgatctgctggtagtgacgagcccatgccatttcttcaatacgatcaaaaatcgggtaagcgctcatcactggtcactccaaaattttcaagcttgttggcaatcatcattgcgatgtcagggattgcaggcgcataggctatgcacgcaggattcgcacataaaccgtaaaccgccgcaatcaacacctgttttttccagttgagttcatcttcgccagtttcattattgctatcattatgctgatcgctgccagcgttctccggtaacaaatcatcagctttttccgttttcttcggctcttcttcctgtgcttcatctggttttttttcgtcaaaagtttcctgataagttgcgtctcccatcaccgcgccacagtcagggcagttatcctcgccagtctgattgcagggtgttccctcctccggttcgctgttctggtgctgtttatcttcagtctgtcgcacttcattttccgtttttttgacttcatttgaggagatatgatgaccgggaatccatttcgaatcattcgggtcgctaatccctgaggtagcctgagtttaacggacactccttcctgaaatagaatggcatcagaaggagctaataatgagcagaaaaacccaacgttactctaaagagttcaaagccgaagctgtcagaacggttcttgaaaatcaactttcgatcagtgaaggcgcttcccgattatctcttcctgaaggcactttaggacaatgggttaccgccgccagaaaagggctcggtactcctggttcccgcacggtggctgaactggaatctgaaattctgcaactgcgtaaggcgttaaatgaagctcgccttgagcgagatatattaaaaaaagcaacagcgtattttgcacaggagtcgctgaaaaatacgcgttaatcgaacaatggcgacaacaatttcccattgaagcgatgtgtcaggtatttggtgtatccaggagcggttattacaactgggtacagcatgaaccctcagacagaaaacaaagtgatgagcggctaaaactggagattaaggtggcacatatccgcactcgcgaaacatatggaacccggcggctccagacggagctggcagagaatggcatcatcgttggtcgtgaccgactggcacgtcttcgtaaggagctaaggctacgctgtaagcagaaacgcaagttcagagcgactacgaactcgaaccacaatctgccagttgcgccaaatctgctgaaccagacgttcgctcctacagcaccaaatcaggtctgggtggcggacctgacgtatgttgccacacaggagggatggttgtacctcgctggcatcaaagatgtttatacgtgcgaaattgtcggctacgccatgggagagcgcatgacaaaagagctgacaggtaaagccctgtttatggcgctcaggagccagcgcccacctgccgggctaatccaccactctgatcgaggttcacagtactgcgcatacgattaccgggtcatacaggagcagtctggtctgaaaacatcaatgtcgcgtaaaggtaactgttacgacaacgctccgatggaaagcttctggggaacgctgaaaaatgagagcctgagccactatcgttttaataaccgggatgaagccatctcagtaatacgggaatacattgagattttctacaatcgtcagcgtcgtcactctcgtctggggaatatctccccggcagccttcagggaaaaatatcatcagatggctgcttaaaaaaagaacaaatggtagtgtccgctattgccagtacacctcattcaaagccgaagctgtcagaacggttcttgaaaatcaactttcgatcagtgaaggcgcttcccgattatctcttcctgaaggcactttaggacaatgggttaccgccgccagaaaagggctcggtactcctggttcccgcacggtggctgaactggaatctgaaattctgcaactgcgtaaggcgttaaatgaagctcgccttgagcgagatatattaaaaaaagcaacagcgtattttgcacaggagtcgctgaaaaatacgcgttaatcgaacaatggcgacaacaatttcccattgaagcgatgtgtcaggtatttggtgtatccaggagcggttattacaactgggtacagcatgaaccctcagacagaaaacaaagtgatgagcggctaaaactggagattaaggtggcacatatccgcactcgcgaaacatatggaacccggcggctccagacggagctggcagagaatggcatcatcgttggtcgtgaccgactggcacgtcttcgtaaggagctaaggctacgctgtaagcagaaacgcaagttcagagcgactacgaactcgaaccacaatctgccagttgcgccaaatctgctgaaccagacgttcgctcctacagcaccaaatcaggtctgggtggcggacctgacgtatgttgccacacaggagggatggttgtacctcgctggcatcaaagatgtttatacgtgcgaaattgtcggctacgccatgggagagcgcatgacaaaagagctgacaggtaaagccctgtttatggcgctcaggagccagcgcccacctgccgggctaatccaccactctgatcgaggttcacagtactgcgcatacgattaccgggtcatacaggagcagtctggtctgaaaacatcaatgtcgcgtaaaggtaactgttacgacaacgctccgatggaaagcttctggggaacgctgaaaaatgagagcctgagccactatcgttttaataaccgggatgaagccatctcagtaatacgggaatacattgagattttctacaatcgtcagcgtcgtcactctcgtctggggaatatctccccggcagccttcagggaaaaatatcatcagatggctgcttaaaaaaagaacaaatggtagtgtccgctattgccagtacacctcaaaagtaattgttccacagtcatatttttaattgcgccccggttaacaagagtccatccctgtttttccagataaaaccggaaagtctccaggggacagaccagtgcgccatcaggaacggtttcggtgaattcgacattgccgaatttgtcgaagtgaacaaccagagtgcgaccatcacccggaatcatcttgtcagcaggtggggtgttattctggcgcagttcggcctccatgcggtcgaactcagcaatgtatgcctctttgaatgcggcggcttttttgcccgtgaagcccatcaccaggaaaacgaagccgtttttggtgatttggtacattgggagtttgcgcccggttgagtcggtgtattcgctcgacacaaaattgtgctcagtgaattttgctgaacagtccagattgcgaattttatccaacatttaacgccttacgcagttgcagaatttcagattccagttcagccaccgtgcgggaaccaggagtaccgagcccttttctggcggcggtaacccattgtcctaaagtgccttcaggaagagataatcgggaagcgccttcactgatcgaaagttgattttcaagaaccgttctgacagcttcggctttgaactctttagagtaacgttgggtttttctgctcattattagctccttctgatgccattctatttcaggaaggagtgtccgttaaactcaggctacctcagtctcgttcattttactcacctgaatgtcttcccaaccaacgacgtgcgccagcttcggttttaaacgttttgcttttggtatacgtcatggcggtgaatgtgccgtcctggttggggaacacgccgtacaccagagattcgttgttgccaagatcgatagtattcatgttgaccccatttccccttaacgccggggtagcggaactgtttgctgagaacaccgtgcggtgtcttgatgaatgaaatttagaataacctaaggtgggcggtcaagatttttgtgtagaaaaacctaagttttttgatgtaaaaaacacaagtgtttgaaagtttgtgctttttattacagggtgtggagaaaaaaggggattatttgtttgcgcttcttttgcgagctttgagtagttcttcaaaaagtttgttgaaattttcaactcgagcacgcatctctgacaacagggccttttgctctgactcaggcagtgcgtcgaacagttgaagtaactctttttgatcttctgtcagaatggctggctgattatccgggatcggttcgcctggttgtttatcttcatccccaaaaagaagccaagtcggtgagcactgaagcgcttggctcagtgcgaataatcttttccccgccggctgtgtttcatctctttcccattgagaaattgttacgtgagccactttgaccagcttacctaatgcggcctgagacagttttaattttttacgcctatgtaagaggcgagcaccgaaggtttcgtttttcatattagggaattctaatttttcttgacttaggtttctctacgatctagtttccttaggaaaatctaaggagctcgatatgttgaaaattgatgctatagcgttttttggcagcaaaacaaagcttgccaatgccgcaggagttaggctggcaagcattgctgcatggggggaactggttcctgaaggtcgcgcgatgcgcctgcaagaggcatctggcggggaacttcagtacgaccccaaagtttatgacgaatatcgtaaggcaaaacgaccttggaaggtgattcatgaaaatcaggcatgagcacatcgaatcagtgctgttgccctggcagccgaaaaagggcaggcgtgggtcgctaacgcaattactgaagaatatctgcggcaggggggcggcgaattgtctctggtaccaggcaaggactggaacaatcagcagaatatctatcaccgttggttgaaaggtgaaacgaaagcgcaaagggaaaaaattcagaaactgatccctgcggttctggcaattcttccgcgtgagctgcgtcaccgactctgtatcttcgataccctggaacgccgtgcattactggcggcgcaggaagcgttgagtacggcaattgatgcgcatgatgatgctgtccaggccgtttaccggaaagcacatttcagcggtggtgggtcgcccggcgattctgtcgtagtgcattgattgaaattaatcgtgccggattgttttgttcggtatcagttaaatgtaacgctgcgagcgttacaaggtgaaaacaaatggcttcaaactggataaagctcgaggttattacgccggataagccggaaatattcaggcttgctgagattctgaatattgatccagatgccgcattagggaaggttattcgcttctgggcatgggcggatcaacaaatgatagacggtaatgcagattgtaacgctcgcggcgttacaaaaagtgcaatagatcgcatcacttttatgtctggttttgctgatgcgttaattcaggttggatggctggtcgaaaatgacggtgggctttctctacctaactttgaacgtcataacggaaaaagctctaaaaaaaaacgggcggttacaaacgagcgagtaacaaaaatacgcgaactgaaacgaaaaggtaacgctgccagcgttacacaaacggatcaaaaagcgttaccagaggaagaggaagaggaagaggaagaggaagaggaagaggaagatctaaatactgatctccccctcgccaaaaacgagcgtctaaaaaattcgagccggaggctattgagctgcccgattggttgccggaaacactctggcatgagtgggtccggttcagacaggcattgcgaaaaccgattcgaacggagcagggcgctaacggggcgatacgggaactggaaaaattccgtcagcagggttttacacctgagcaggtgattcgacacagcatcgccaatgaataccagggcctgttcgcgccgaaaggtgttcggcctgagacgttgctccgacaggttaacaccgtctcgttgccggacagtgcgatcccgccaggcttcagggggtaacggaccatgaaaaatattgcgacaggcggcgttctggaacgcatccgccgactgaccccgccacatgtaaccgccccattcagaacggtagcggagtggcgcgagtggcaacttgctgaaggccagaaacgtagcgaggagatcaaccgcctgaatcgccagttgcgggtggaaaaaattctgaatcgctcaggcatccagccgttgcaccgtaaatgctcgtttgcgaattaccaggtgcagaacgacggccagcgatacgcgttaagccaggcgaaatccatcgccgatgaactgatgaccgggtgtacaaattttgcgttcagcggaaaacctggtaccgggaagaatcacttagcggcagctatcgggaatcgcctgctgaaagacggtcagacagtgattgtggttaccgtggctgatgttatgagcgccctgcacgccagctatgacgacgggcagtcaggcgaaaaatttttgcgggagctgtgcgaagtggatctgctggttcttgatgaaattggcattcagcgcgagacgaaaaacgagcaggtggtgctgcaccagattgttgatcgccggacagcgtcgatgcgcagcgtggggatgctgacaaacctgaactatgaggtgatgaaaacattgctcggcgagcgggtgatggatcgcatggtcatgaacggcgggcgctgggtgaattttaactgggagagctggcgtccgaatgttagccattcgagggttgttaagtagtttcaggaggatttatggcgaaaccttttactcccgaacagcgggaagaactgaagacgcgaattgtggaactcgtgcatcaggacggtcgggtcacgattcggcagttgtcagatgaaacaggtatcagtcgtgcgtctgtcggtcgcttatgcatagaactggtcgcaagtggtgatgtatataattctggctacggcttattcccgtctgaacaggctcgcaaggactggcaaagcgcccgcaaaaaactctcgagagtaaaggtgaggaaaccggttgttgttgatccggaccttatctggtcattacctgacggagaaatacgccgctacgacaggcgcctgaatataatctgtcgcgagtgccggaagagcgaagctatgcagcgtgtactggctttctatcagggtaattttcaggaggcgatactgtgaatgaaattagctatcaggcttcaattaccgctggcattcgcatcaaaggagaggagcatggaaataaaaccagaagatgagttaagcaatatcgttttatttccggtaaaagaggatgaccctcgtaatcaggttaattttctttatgagccatcggaaagaccatattgccatcacgcctctgtacgggttgacgaaaaagagcgtcaggtccgctgtaaaatctgcggtgcggttgtggagccgtttgactggatgctctctgtggcaaaaagagaaaccagactggcagatgatgtaaggctattgcgccaggaggaacaggaaaggcggagaaatatagaaaagctgatacagattgagcgtaacgcgaaagcgcggatacgcagggcgacaaaatccagaactgaataattaaatttagcactgttaaaaatttaatccttaaccggagggatttctgcaccctcaaatcatcaggagaccacccgaaagggcggggagcagtcacacatctgtttccgatagccccgttctaatgctacactctttgatatttttatgaccccaataaacatatttatgacagttgctgatttcaaacggcccaaattggagctcccaaacggggcaaacaaactactactgcactcttgctgtgctccatgttccggtgaggtgatggaggcgcttcaggcctcgggaatcgactacaccatctttttctacaacccgaacattcatcctcagaaagagtatttaattcgtaaggatgagaatattcgctttgctgaacaacacggcgtgccgtttattgatgctgattacgacacagacaactggtttgaacgagccaaaggaatggaatgggagcccgaacgagggatccgttgcaccatgtgttttgacatgcgttttgagcggacagcgctgtacgccgctgaaaatggtttcagtgtgatcagcagttcactgggcatttcacgctggaaaaatatgcagcaggttaacgactgtgggcggcgagccgtcgcgcattatccgggcatggtgtactgggattataactggcgcaagcagggcggctcgtcccgtatgattgaaatcagcaagcgcgaaaaattctatcagcaggaatattgtggctgtgtgtattctctgcgcgataccaatctacaccgcaaatctcagggacgccctcttatcaaaattggtcaactccactacggtaaagaagagaaggagtgattttatggggcacctttctgattgatttcatattggcgaggtaagtagaatgactgcgggtgcttgaggctatctgcttcaggcatgaacaccaaaaggcagatagagaaaagccccagttaacattacgcgtccggcaagacgcttaacattaatctgaggccaatttcatgctttgcacatgtaggttagcctcttacatgccgaaaggcaaggagaagcaggctatgaagcagcaaaaggcgatgttaatcgccctgatcgtcatctgtttaaccgtcatagtgacggcactggtaacgaggaaagacctctgtgaggtacgaatccgaaccggccagacggaggtcgctgtcttcgtagactacgaatccaggaagtaagagtgaccgggcggggagctgatcccatccccgcccacctctgatgtgtcaggcatcctcaacgcacccgcacttaacccgcccatcgctgtgatctctcagcgtttcggcgggttttttgttgtttatttccggtgaatttgattcgcgcaccttcgcagatagaatcgactcacttaagtagcgcgcagggagaagagggatggaccccgaacaggggagagctatttatctggaaggattctgaagatgaaaatcgaagaattgcgtgaaatttttagtgaaaatggcctctatgctgtgcgcgttgagaatggagcgattgtcagccattgccgcattagatgtttgcaatctcaacaaaggaagagcggtgctgtgttattttatttttgtaatggacttctgacggacggttttattttgcgtgaggacgaatttgtcacatcattacgggttttgaaagagattggttttaaggctggttttctgcttttgctgaagaataaactcatctacaatcttgagcaggattgaactcctgctgtgtaacaccgtgccaccggagaaagccgatggcacatatacaactggtcaaacaaacctcttccggattacttctcccggcgacgccggagagttgcgattttctgcatcaaatcaaaataggtgagtggatacacgcagactttaagcgtgtgtgtaactacgcattccacaagcgttttttcaaactcctgcaactgggtttcgattactggactccggtcggtggggcgatcacgcctcgcgaacgaaaactggtgtccggtttcgttgattacctgtgtgaatcagtaggccgggaacatacgccagctctgagcgaagccgcagagcaatatctgaatacagttgcgacacgcagaaccagtgatacggcattgctaaagtcgtttgaggctttccgcgagtgggtagccattcaggccggattttacaccgagcatttttatccggacggtagccgtgggtgtcgggcgaaatctatcgcgtttgcgaatatggacgaaaccgagtttcagcaggtttataaatctgttctgaatgtgctgtggaactggattctgttccgtaaattttcctctccggaacaagtcgaaaatgtggccgcgcagctgctggagtttgcgtaatggtggatttacgtaaagcggcgcgggggcagatgtgcaccgtcagaattcctggctactgcaatcacgatccggaaacgtctgtgctggcgcattaccgactggcgggaacgtgcggaacagcgataaagccacacgatatgcaggcagcgattgcctgtagctcgtgccacgatttaatcgacgggcgggtaaaaaccagcgattacaccaaagaagaattacgcctgatgcatgcagaaggtgtttttcgcacacaagaaatctggagaaaggagggatatttatgatttacccaacgaatacaggaaaaagcggagaacaccttcgtctcaccacgctggaaagtgtctggattcagggaaaactacgtatgtgggggcgctggtcgtatattggtggcggtaagacggggaatatgtttaacctgatgttgacctctaaaaagctgacaaaaacggcaattaacgaggcgctccggaggatgaaaaaagcaggtctgaacaagtctgaacttgaggcttttttgcgggatatgattaacggtaagcaaaagagctggctggcgcattgtactgatgcagaggcgttatgtattgatcgggtcataagtgaggtgctggcagagcatccaggattgattagcgtccttcggcaacggtatgaggggcgggggatgaccaaacgcaaaatggctgaactgctgaatgatgcacacccgaaatggagtttaagaacctgtgaaagacgcattgagcattggctaaaggtggcagaatttattttgtacaaaccaatggttatggcttttggtatagagaaaaaagttattgctttttgacgtaaaaactgcttcaattcttgtacgcttcgcaaagctgtaccgcgaggcgaatagcagacatggacatttgaaagagcccgctttatgcgggtttttttatacctgaaaaacggcacaggacgttaaacgtgctggtggtcagatgagtttgcagatgtgatgacatatggttattattctgcctccggccctttagctcagttggtcagagcgagcgactcataatcgccaggtcgctggttcaagtccagcaagggtgaagtagtcaacaaaaactggccaccgagttagagtttttccagtatcgattttccgattcgtttgggggtaacccaccgttatattcgtgcggtcttagtgcgctgtaatatccaacgatatagtccgttatggcgtgagctgcctcgctgaagcttacgtaacccaccaccggcatccattcgttcttcagactcctgaagaagcgttccattgggctgttatcccagcagtttccgcgccggctcatactctgtctgatctggtatcgccacaataactgccggaactgcctgctcgtataatgactgccctgatcgctgtggaacatcaccccgccgggcttaccacgggtttcccatgccatttccagcgctttcatggtgagcctgctgtccggcgagaacgacatggcccagcccactggttttcttgcgaacaggtcgagaacaacggcgaggtacgcccagcgcttacccgtccagatataggtcacatcaccgcaccacacctgatttggctcggtcacggcgaactgcctttcaaggtagttagggatagcaacatgttcatgaccaccacgtttataccggtgagtcggctgctgacagctgaccagccccagctctttcatgagcctgccagcaagccagcgtcccatctggtagcctctccgggttgccattgtggcgatgcttcttgctccggccgaaccgtggctgatgccatgtagctcaagtacctgactgcgtaatacagcccgtctgccgtctggtttttcaggacggtttttccagtatctgtagctgctgcgatgaaccccgaacacatggcagagtgtgaccacaggataatgcgctctgagtttcccgattatcgagaactgttcagggagtctgacatcaagagcgcggtagccttttttaatatttcattctccatttcaatgcgttgtagctttttcctcagcttacgtatttcgatttgttctggtgttatcggagaggcttttggtgttttgccctgacgctcatcacgcagttgtttgacccatcttgtcattgtggaaaggccaacatccatagctttggcggcatctgccaccgtgtatttctggtcaacaaccagttgagcggattcgcgtttaaactctgcgctaaaatttctttttttcattggagcacctgtgttgttctgaggtgagcatatcacctctgttcaggtggccaaattcagtgtgccacttcattgtcggtcaggttacgtagtgaacctctggcaggggactgataatgcatcattctggtgttgtaaatatctcttcggacaacttacaaaatattctaagcaaaccccgggaacacactcttaactgccttggctggcggttttttgtacagtgctcggtatgtgtgagctggaaatcagattttgcatggactggaatcatgctgttatttaggggcgaagaactggctttttcttccgccttctcaccagtaacgattagaaaaataatgaaatgcccccctccggggaggaggaccgtagaaaaaaggacccgccagcaaaaacattggggatgaacagctttcgctactcagattgctggcgggtaaagttcctcatgaattaagaatgctacgcgatcttttttaatggaaatgaaaattattgtcaattagtcgtgcgtgttttttcatacaatattggtaaaggtgattcaggccatcagagttttgctgatggccttttttctttccgatagcacaggtctgtcggggggggggcgggatatgtatcagatggaaaaaatatcaacaggcattgcctacggcacctccgccggcagtgccggctactggtttttgcagtggttggatcaggtcagtccatcacagtgggctgcgattggtgtgctgggaagtctgcttctggggcttctgacttatctgacgaatctgtatttcaaaataagagaagataagcgtaagtggatttgcccctatatttccagacatctgttatcacttaacccattacaagcccgctgccgcagatattcccgtggcgagcgataacccagcgcactatgcggatgccattcgttataatgctcgaacgcctctgcaaggttctttgctgccgttaacccgtctggtttgggcatgatactgatgtagtcacgctttatcgttttcacgaagctctctgctattccgttactctccggactccgcaccgccgtgttcttcggttcaagtcccaacatccgggcgaactggcgtgtttcattagcccggtagcatgaaccattatccgtcagccactccactggagacgacggaagatcgttgccgaagcggcgttccaccgctcccagcatgacgtcctgtactgtttcactgttgaagccgccggtagtcaccgcccagtgcagtgcctcacggtcacagcagtccagcgcgaacgtgactcgcagtttttctccgttatcacagcggaactcgaacccgtcagagcaccatcgctgattactttctttcacagccactctgcctgtatgtgcccgtttcgatggcggtacagcaggttttcgctcaagcaacagcgcattctggcgcatgatccggtaaacacgtttggcattgatcgcaggcataccatcaagttctgcctgtctgcgaagcagcgcccatacccgacgataaccatacgtgggcagctctccgataacatggtgtatacggagaagcacatccgtatcatcagtgtgacgactgcggcggccatccatccagtcatcggttcgtctgagaatgacgtgcaactgcgcacgcgacacccggagacaacggctgactaagcttactccccatccccgggcaataagggcgcgtgcgctatccacttttttgcccgtccatattcaacggcttctttgaggagttcattttccatcgttttcttgccgagcaggcgctggagttctttaatctgcttcatggcggcagcaagttcagaggcaggaacaacctgttctccggcggcgacagcagtaagacttccttcctggtattgcttacgccagagaaataactggctggctgctacaccatgttgccgggcaacgagggagaccgtcatccccggttcaaagctctgctgaacaattgcgatcttttcctgtgtggtacgccgtctgcgtttctccggccctaagacatcaatcatctgtactccaatgactagtctaaaaactagtattaagactatcacttatttaagtgatactggttgtctggagattcagggggccagtctagtaaggctgcgagaggtgaataatgtcgccatcattacgcaaggctgttgcagttgctattggtggcggggctgttgctatagcatctgtgttaatcactggcccaggtggtaacgatggtctggaaggtgtcagctacatactatacaaagatatcattggtgtatggactgtatgtcacggacacaccggaaaagacatcatgcctggtaaaacgtataccgaagcagaatgcaaagctctcctgaataaagaccttgccactgtcgccagacaaattaacccgtacatcaaagtcgatataccggaaacaacgcgcggcgctctttactcgttcgtttacaacgtgggcgctggcaatttcagaacatcgacgcttcttcgcaaaataaaccagggctatatcaaaggcgcatgtgaccagctatgtcgctggacatatgctggcggtaagcaatggaaagggctgatgacccgtcgtgagattgagcgtgaagtctgtttgtgggggcagcaatgagcagagtcaccgcgattatctccgctctggttatctgcatcatcgtccgcctgtcatgggctgttaatcattaccgtgataacgccattacctacaaagagcagcgcgacaaaaacgcaagagaactgaagctggcgaacgcaaccattactgacatgcagcagcgccagcgtgatgctgatgcactcgatgctaaatacacgaaggagttagctgatgcgaaagctgaaaatgatgctcttcggcgcaagcttgataatggtggtcgggtgctcgtcaaaggaaaatgccctgtgccatcctcagccgaaacctccagcgcctccggcatgggcaatgatgccaccgtcgaactctctccagttgctggacgaaacgttctcggtatccgggacggaatcatcagcgaccagacagcattgagaatgcttcaggagtacatcaggatccaatgccttggggggtagcggtaattttactcattatccttcaaatcagattctgttgtcagaggaatgggggaagctggattcgcaagagctttttatgggcagtttagctaaaaaaaggcaacacgaagctaaaactaccaacataaagtgctgaccagctagcagctgaaatcagactcactgtatacactttcactggatgaagttgcaacattcctgccaccaaaggagcaatataacgcagcacggcgataaagcgcgaagtgaaaagtattgacacagagttattttgcaactgaaggcgaacccgttctattgtattggaacggcttgatattatacatgcaagttgagggatatgcccaattattataccaagatggtaattaacgatagtaccgcaccatgcgccactcatgaccgtgattccagcttcccatggtgaaagagtcgtcttgctgactgtaattacagtggccatcataattgatgctggtggcaatatcgccgaaatgagtaaagtggattttgtgaacgctattataaaaagaagcccccataggcgatatggatgaagtacaaaatagttcatcaaagcatttatccactccatcaatgtctttccttctgtgaatttttctttgctatttaaccgtgatacgacttaatttaggcttaaacaccttacatttacaaggtactcctgtggggggccctgccacggagcgtcgcaggagtgagtgatgaggaagaattaaagcaacctattgtgacaggcagcgataacagtaaatcacaggaagcataatcatggcaaaaccggactgggaggccatcgaatcggcataccgggccggagtccttagcctccgtgatataggcgagaaatacggcgttacagaaggggctatcaggaagagggccaaaaagcttggttgggcacgcagtggcggtacgcaggtttgcaaaaatggtacgcaaaaaaggaaagtgcgtaccagcagaaagcctgccattactggccttacacaaaaaagtacgcaactaaaaacagaatctacaccggatacgaaaccgatacgcggaatgcgtaccgatcccccgactaacccattccaacccggtaaccagcaggcattaaaacacggtggttatgcccgtcgccttctgctcaaagatgaggtgatagaggacgctaaagcgttgacgctcgaggacgaattatttcgccttcgtgctaacaaccttgtcgctgcagagaatattggtcggtggttggtgtcgctggaagatgctaatggggaccaggaaaggaagatgctgattgaaaatatcagcgccgccgagaaagcaatgatgcgcaatacagttcgtattgagtccatcgttggcacgcttgcgacggtaggaaaaatatttgctgatacagcctaccgcaaggccgccactgataaggtgtctctggaggctgatcgtcttcgccgtgatgcaggtattgatgatggcaatggagagcgtgacctcaatgacttctactctgacatccaaaccgacgctgaatccggctttacgtagtttctggactatgcgggcacgtaacaaagtgctttatggtggtcggtcatcgtcaaaatcatgggatgccgctggcattgccatatttctgtcgaataaatacaccctgcgtttttgttgtgcccgtcagatccagaataaaatcgaagagtcggtgtataccctgctcaaaattcagatagacaggtttggtctgcggcaccgtttccgtattctgaacaacaaaatcattaaccgggttactggctcggaatttgttttttatggattatggcgcaacatcgaagaaattaagtcactggaggggatcgatgtgttgtggctggaagaagcccacgcactgacggaataccagtggaaaattctggagccaacgatccgtaaagagggttcggaatgctggttcatattcaaccccggacttgttactgatttcgtctggcgcaacttcgttgttgatccgcccgaaggcactctcatccgcaaaattaactatgacgaaaatccgtttctgtctgacaccatgcttaaggttatcgacgcggcgcgacgccgtgatccggatggttttaaacatgtgtatgagggcgttccggagtctgatgatgatgcggcaatcatcaaactgtcttggatagaagccgcagtggatgcgcacaaaacgttaaatttcgaacccagtggaagaaagcgtattggctttgacgtggctgacagtggtacagataagtgcgctaacgtttaccgtcacggatccgttgttttctgggccgacgaatggaaggccaaagaagatgaattactgaagagctgccagcgtacttatcaggcggcgctggagcgtgaagcagatattgtttacgactctatcggtgttggtgcgtctgccggtgctaaattctctgaaattaacgctgaccggaagagcgagaacgcatacgcgcgacgtgtgaattaccagaggtttaacgccggtgctggtgtgcatgagccagatgacgagtacaacggcatccccaacaaagactttttcgcaaatcttaaggctcaggcatggtggctggtggctgaccgtttcagaaatacgtttaacgccattaacaacggagaacagtatcctgtggatgagctgatcagcatagattctcgttgtccgttgcttgaaaagctgaaactggaactgacaacacctcatcgtgatttcgaccgtaacggacgtgtgatggtcgaaagtaaaaaagacctcgcaaaacgcgagataccgtcaccaaacgttgctgatgcattcattatggccttcgcgccaatcgatacatcgctggatatctgggaacagctggggagacaggcctgatggcacgaaacaaacaagccctgcggcgaactgtgcaggccacagctgatggttatgagaattttattgcccgcgtagggatgcagacacctaaccagcactcagcatccacctaccgggctaatttcaccagtcgtaaccgcatgctggtggaatggtcctatcgttcatcctagatcatcggcgaagcagtcgatgctatcccggatgatatgacccgcaaaggcattcgcatcacttcggaaattgatgcaaaagatcgtggcattctcgaatcacaactggatgagttgcaaatctgggatgcgctgaatgacgtgctgaaatggtcgcgcctctacggcggcgcggtgggtttcatcatgattgaggggtaggcaccaatgaccccgctgcgacccgaaaccatcggtaagggcaagtttaaggggattctcccgctcgaccgctggatggtcgacccggcactgacccgccgcattaaagatatggggccggacctgggtaaacctgagttttacgatgtggtgaccacagcaacgggaattcctgcctggcgcattcatcacagtcgcctgattcgctttgatggcgtcacgttgccatttcagcagaagatgaccgagaacgaatggggaatgtcggttgtagagcgtatctgggatcgtcttaccgcgttcgacagcgctactgtcggcgcggcgcagctggtctacaaggcgcatttgcgtacctacagcgtggagaagctacgcgagcttatcgcacttggtggtcctgcgtatgaagcgttgctgaagaatatcgacctgattcgacagttccagagtaatgaaggcatgacgctcatggactcgcgggataagtttgaaacccatcagtacagcttcagtggtctggatgacatcctttcgcagtttgtagaacagattagtggcgctgttggtatcccactggtgcggttgttcggacagtccccgaaaggattttctaccggtgatgcagaccttgccaactattacgatcgcatcagttcgttgcaggagaggcgtttacgtcttccggtgcggcggatactggacatcatgcatcgttcggaacttggcaagccgctgccggacgatttcacgtttgagtttaacccgctctggcaaatgtctgatgtcgatcgctcaacggtggcgttaaacaccaccaacgcaatcagtacggcgctgggtgatggtctgatgacactgaaagccgctatgactgatttgcgagaaaattctgacgtaaccggcatcggggcatccattaccgacgaggacatcgagaatgccgaagatgaagcgccgcccggcatcggcgaacctgatgacgaaccgcaggagccgtcaggcggaaatccggtatcgaaccagcctacgcaggatagcgagggcggtcggagacatcgtaaatggtcgctacgatggttcaaatgacagtatcacggaaattattgcggcgctggagcgttacagtgaaatcatcaccccctgggcgacaaaggtcgcggaaaactttactgcggacctaacccggcagaacgagaaagtttggcggcaacacagcaagaacatcagtcgcgagctccgcaatcttgtggaaagcgctcctgtgggccaggtgatgcaatccatcatcgccgaacaggtcaagtacatcaaatctctgcctctcgaggccgcagacagggtgtacgacatccagaacaaagcgatagaggctgttgtcaccggtggtcgggcggagcagtttgctaaagagattgcatctaccggcgatgttgctaagtctagggccgatctgattgcccgaacggaactgggaagagcaacgggcgcgctggatatggcccgagcgatagctattggctcggatggttatatttggcgtacagccgatgatggcgatgtccgagattcccacgatcacatgaaaggtaaattcgtccgctgggattcacctccaactttggacggcatgaccggccacgcgggcgagctgccaaactgccgctgctataaagagatcgtgtttgttcgcgttccattcgcaatgaaaagggcagcataacccatgaaatacttttttgagaccaggctcggggaaacccgataccgcctggctgacggctcgttgctgtgcaaagacgtgccgataggacgaacaggtaagcagctctatggtgctgatgacctgccaaaactgaaacccgataagttcggtgaaatagtcgtcacgcgttctcctgagcaggtattccatccggccacgcttgcctcattcgaagggatgagcatcacgatcctgcatcctgaagatgaaaacgggaatgtgcggctggtaaatcccgagaactggaaagagcttgctgtcgggcacctccagaatgtccggcgcgggacgggtgagcagtctgatttgatgctggctgaccttatcgtcaaagacgaaagcgccattcagcttatcgaagatggcctgcgcgaagtgtcgtgcggctatgacgcggagtacgagcagaccgagccaggtaaagccgagcaggtcgatattaccggaaaccatgtggctcttgtccctaaaggcagagccggaaatcgttgtgcaattggagacagagacacaatggcaaatcaaaagaaaaactggtggaaccgcatgcgtgcggccatcaagacaggagatgccgacaccatgaacgaactggtggagtcggctcccgcatcggttacaggagatgagggggatttgccgcagggcgttaatctcaacatcaacctgtccccgcagcaaccactaccggacaaagcaccagagatgggcggagatccaaccggcgacagtgatgatgacctcaaaacattactgaaagccctgctggctaagctggaaagaaatgccacgggcgataacgataataagcctgacgataatccgaccggtgacggcgaggacgatgaagaggaaaccacgattactggtgactcagcctggcgtgccgaagttatcgttccgggtatcgatctgagccgtaagatgaaaccgaccgcgttcaaacgcgaggttctggcttctgctgacaaaacgctggttcgccagatagtcggtgatgcggatatccgcaaattaccgaaacaatcggtcgacatggcgtttaatgccgtgtctgaggttgccaaagggcgaaacacccgcgccaccaccggcgatgcacagcgcctaaacatgggcatgaccagtatcgcttccctgaacaaacaaaacgctgaattctgggcaaaccgtaaagggtaaaaaatgaataatgtatttctgtaccggatgcctgttggcattgccggggctgtctctcgcccgcaggacttaaccgtcgaaccggtggtccttaaatccgataacgccttcgctgcctatggcctggctggtaaatacgatgatgacggttttttcgtgccgctggcagatggtgataccgcagacaaggtgaaggggatctacgtgcgcccttatccgaccacgtcgcagccggacatggttcgccaggtgggaacaggcaagaacttcccgggcgacgccatgaagcgtggctacgtgaccgttaatctcggttctgattttgatgccagcactatcaaaaaaggcgatccggtatacgttgtcgtctccactgatgaatccatcaaagtgccgctgggtggattcatgtccacgtcagtcagtggcaaaaacgtggtgctgaccaacgctgaattcacaggtgccggtgatgctgacggcaatgcagaaatttcctggaagatttaaggaacagacgaatgaggtgatgctgccaacttactgatttagtgtatgatggtgtttttgaggtgctccagtggcttctgtttctatcagctgtccctcctgttcagctactgacggggtggtgcgtaacggcaaaagcactgccggacatcagcgctatctctgctctcactgccgtaaaacatggcaactgcagttcacttacaccgcttctcaacccggtacgcaccagaaaatcattgatatggccatgaatggcgttggatgccgggcaactgcacgcattatgggcgttggcctcaacacgattttacgtcacttaaaaaactcaggccgcagtcggtaacctcgcgcatacagccgggcagtgacgtcatcgtctgcgcggaaatggacgaacagtggggctatgtcggggctaaatcgcgccagcgctggctgttttacgcgtatgacagtctccggaagacggttgttgcgcacgtattcggtgaacgcactatggcgacgctggggcgtcttatgagcctgctgtcaccctttgacgtggtgatatggatgacggatggctggccgctgtatgaatcccgcctgaagggaaagctgcacgtaatcagcaagcgatatacgcagcgaattgagcggcataacctgaatctgaggcagcacctggcacggctgggacggaagtcgctgtcgttctcaaaatcggtggagctgcatgacaaagtcatcgggcattatctgaacataaaacactatcaataagttggagtcattaccaacagggggatttaccatgcttattggctatgtacgcgtatcaacaaatgaccagaataccgatctacaacgtaatgcgtttatttgtgccggaagtgagttgattgttgagcgaatgggaagttggccagaagttgttatggcatagtgtttacggtcgttgatacaggtaaacaaaagcggggagagtcatactccctgaatagtcgcgaaaatatctgtggcattgtcaaattcgtgtcggtgactaatattttagtaatatgccattcgaaatggagtgctaacttattgatttaattgatgtgcgatattgtattttatcgtgttttgttgtctgttttttatccagtaagtgttgttatgtgtatgaaagataagggatttatcatttttgaggtgtgttcatgaagcaaacagtttatatcgccagccctgagagccagcaaattcacgtctggaacctgaatcatgaaggcgcactgacgctgacacaggttgtcgatgtgccggggcaggtgcagccgatggtggtcagcccggacaaacgttatctctatgttggtgttcgccctgagtttcgcgtcctggcgtatcgtattgccccggacgatggcgcactgacctttgccgcagagtctgcgctgccgggtagtccgacgcatatttccaccgatcaccaggggcagtttgtctttgtaggttcttacaatgcgggtaacgtgagcgtaacgcgtctggaagatggcctgccagtgggcgtcgtcgatgtggtcgaggggctggacggttgccattccgccaatatctcaccggacaaccgtacgctgtgggttccggcattaaagcaggatcgcatttgcctgtttacggtcagcgatgatggtcatctggtggcgcaggaccctgcggaagtgactaccgttgaaggggccggcccgcgtcatatggtattccatccaaacgaacaatatgcgtattgcgtcaatgagttaaacagctcagtggatgtctgggaactgaaagatccacacggcaatattgaatgtgtccagacgctggatatgatgccggaaaacttctccgacacctgttgggcggctgatattcatatcaccccggatggtcgtcatttatacgcctgcgaccgtaccgccagtctgattaccgttttcagcgtttcggaagatggcagcgtgttgagtaaagaaggcttccagccaacggaaacccagccgcgcggcttcaatgttgatcacagcggcaagtatctgattgccgccgggcaaaaatctcaccacatctcggtatacgaaattgttggcgagcaggggctactgcatgaaaaaggccgctatgcggtcgggcagggaccaatgtgggtggtggttaacgcacactaaccgctgatttacccggcgcagtctctcctgcgccggtgtattaacctatctcctgtaacgcatgtctctggcgttcgacgatattggtccacaaattgtctttatcgtcagtccacaaattaatcagcaaggcaaaaaagcgttctgctgccggagaaagcacggcatctttgcggcgaataatccccaatgtccgacgtataacgggttccaccagtggaataccaataatcgaagaatagggcgcatggggcattgccagaccaggaagcgccgaaatccccagtcccgcctctaccagtcctaatgacgtcgaaagatgacgcacttcgtaaaaccagtccagcttccagggcttgtcggccagctgttgttctatcaacagtcggttgccgctggaggagcgtacgccaatcattttgtaacccactaactcctgccattctacaagctgctttttggccaatggatggtcacgccgacaggccagcacgaacggctcgttgaccagtggggtaaaatcaatggatgaatttgtgacgttgttcatgtttatgccaaagtctgattcgttacacagcaccgattccatgcaattattcgtgccttgttccagaatccgcactttaatattgggatacagctcattaaatttaccgattgccagcggtaaaaaataaaatactgcggtcggaatacacgctaacgtcaccataccacgatgataagcattcatatcacgaatattaaaaagcgtttcatcgaatttctttattaattcccgcgcctccgggagcaacctttttcctgcttttgttaacgtaaccttgcgagttgtacgctcaaatagttgaatatgtaaatcttcctccatcttttttattcttcgcgttaatgcaggttgcgtaatattgagtaatttagcggcattgttaaacgaactggactctgccagtatgacaaatgccttcatacttgataattcatgcttcattattactccggaaaatggaagcgacgattttgggtggctggccgttaaaaattttaactgcatttagccaacttaaattaatgaaaaaatgttattaatcgttgagctaaagtcattagagatgctttgcccttaatgtaaccatatcgcaataagttatgtttttaaattgagggcattattatgaaaaaaataccctgggtaatgactccaacttattgatagtgttttatgttcagataatgcccgatgactttgtcatgcagctccaccgattttgagaacgacagcgacttccgtcccagccgtgccaggtgctgcctcaaattcaggttatgccgctcaattcgctgcgtatatcgcttgctgattacgtgcagctttcccttcaggcgggattcatacagcggccagccatccgtcatccatatcaccacgtcaaagggtgacagcaggctcataagacgccccagcgtcgccatagtgcgttcaccgaatacgtgcgcaacaaccgtcttccggagactgtcatacgcgtaaaacagccagcgctggcgcgatttagccccgacatagccccactgttcgtccatttccgcgcagacgatgacgtcactgcccggctgtatgcgcgaggttaccgactgcggcctgagttttttaagtgacgtaaaatcgtgttgaggccaacgcccataatgcgtgcagttgcccggcatccaacgccattcatggccatatcaatgattttctggtgcgtaccgggttaagaagcggtgtaagtgaactgcagttgccatgttttacggcagtgagagcagagatagcgctgatgtccggcagtgcttttgccgttacgcaccaccccgtcagtagctgaacaggagggacagctgatagaaacagaagccactggagcacctcaaaaacaccatcatacactaaatcagtaagttggcagcatcacccaaaaaaggcactattgcctggtctattctctcttctcataatacgtccggaaatatggataaacttaaaattaagtttgattcattagcctctcacgatattacctttgttggtattgtacagaccgctaaagcgtccggaatggaacgtttcccgctgccgtatgtgctgaccaactgccataactcactctgcgccgtcggcggcaccattaacggtgatgaccatgtttttggtttatcggcagctcagcgttatggcggtatttttgtgcctccgcatattgcggtcatccatcaatatatgcgtgagatgatggcaggcgggggcaaaatgatcctcgggtcagacagccacacccgttacggtgcattagggacaatggcagtcggtgagggtggcggtgagttggtaaaacagctgcttaatgacacctgggatatcgactatccgggcgtggttgcggtgcatctgaccggaaaacctgcgccgtatgtggggccacaggatgtggcgctggctatcattggcgcggtgttcaaaaacggttacgtcaaaaacaaagtcatggagttcgttggaccgggcgttagcgcgctctctaccgatttccgtaacagcgttgacgtgatgaccacggaaaccacctgtttaagctccgtctggcaaactgatgaagaagtgcataactggctggcgctgcacggtcgcggccaggattactgccagcttaaccctcaaccgatggcgtactacgatggctgcatcagcgttgatttaagcgccatcaaaccaatgattgcgctgccgttccacccgagcaacgtgtatgaaatcgacacactgaaccagaacctgaccgacattctgcgtgagattgaaattgagtccgaacgcgtggcgcacggtaaagccaaactctcgctgctggataaagtggaaaatggtcgcctgaaagtgcagcaggggattatcgcgggctgttctggcggtaactacgaaaacgtcatcgcggcggcgaatgcactgcgcggtcaatcctgtggcaatgacaccttctcgctggcagtttacccgtcatcacagccggtgtttatggatctcgccaaaaaaggtgtggtagcagatttgattggcgcaggcgcaatcatcagaaccgcgttctgcggcccatgctttggcgcgggcgatacgccaatcaacaacggtttgagtattcgccacaccacgcgtaacttcccgaaccgcgaaggctctaagccagctaatgggcagatgtcagcggtggcgttgatggacgctcgttctatcgctgcgactgcggcaaacggtggctatttaacctctgccagcgaacttgattgctgggacaacgtgccggagtacgccttcgatgtaacgccgtataaaaaccgtgtttatcagggctttgtgaaaggggcaactcagcaaccgctgatttacgggccgaacattaaagactggccggaattgggtgcgctgactgacaatatcgtcctgaaagtgtgctcgaagatcctcgacgaagtgaccaccaccgacgaactgattccttccggtgaaacctcttcttatcgttcaaatccgattggtctggcggagtttaccctgtctcgccgtgatcccggttatgttggcagaagtaaagcgactgctgagctggaaaatcagcgtctggcggggaatgtcagcgagctgacagaggtgtttgcgcgcattaagcagattgctggtcaggagcatattgatccgctgcaaactgaaattggcagcatggtctatgcggtgaaaccaggcgatggttctgcgcgtgaacaggcggcgagctgccagcgtgtgattggcggtctggcgaatattgccgaggagtacgcgactaaacgctaccgttctaacgtcatcaactgggggatgttacctctgcagatggcggaagtgccaacctttgaagtgggggattacatttacatccctggcattaaagcggcgctggataatccgggtacgacgtttaaaggttatgtgatccatgaagatgcgccggtaacggaaattacgctctatatggaaagtctgactgctgaagagcgcgagattatcaaggcgggtagtttgattaacttcaataaaaaccgtcagatgtaaaaagcgccatgtgaatgtaggtcgcattcggcacttattgtcggatgcgatgcttgcgcatcttatccgacctacgaatcgcatcgaatctgtaggccagataaggcatttacgcagcatccggcacttattgtcggatgcgatgcttgcgcatcttatccgacctacaaatcgcatcgaaccgtaggccggataaggcgtttacgccgcatccggcaaatagttaattgctcttacttcttcgcctctgcaaccactttactacccacgccgcggttattgtattcccacatgcggttgtagttagtgtcattcagattgcgctgtatttcgtcgttatcatctacgctgccggtattacccgcaaacggacgattagagatcaccgcatcggcccacggtttagccgtgttaaaaccttcgttgatggcgctatcacggatcaccacctgaccgttggtattggcatcaacatccagcgagcggcccagttgcgccacaccatcaccgaaagcattgaaacggctgtttacggcgaggaaaccgtagtacatgttggacagcgtagccggtgcaaacacatacgcttcttgctgagtacgtgagttcaccacgcggaattcggtgttatcgaacaccactgcgccgcgaccagaaacgatatccacatccccttcaatgtagctgttggtcaccagcgtacgcggctgacgattcgtttccagacggttctgcacaccgctgttggtgacaaagaaggtgttctgacgaccgagaatgttaacgttgttaatctgtacctggtcaccatcagtacgcagtgccaccgccggatggttacctgcatctacgctatcgcccagcgtgttttcgatggtcagattttgcagttgcaggccattgttttgtgaccagaagaccgcagagcagagaacaccgatactgtcgctgcgtttgctctggcagctatcgtacatataccacgctggtttacctggcatatatttgccgcgcgggttgacgtcgtgacgccagtcggcagggctcatgccaccatcaagggaaagcccaatcttcacatcaatcggtttttcacctgtaccgtacagagtaattccacccggagcggcagggacatataccgttccctgatactcaccaggcatcacggcaatatactggcgcttgttggtacgcttgataattgccgcatctaccgccgcctgaatcgtggtatgcgttacaccttgagtgcccgccgggccgacaacaaagtcaggttgcgcaggcagggtaatcggggaaggattccacgctgcagcacctggtgtcagggatgcaaaatagtgttgagcatcgaaattctgcgcttcttttgccgacagaatcgggcgagaagaggtaccaggcgcggtttgatcagaaggacgttgatcgggcggggttgagctacaggcggtcagcgtcacgccaaaagccaatgccagcgccagacgggaaactgaaaatgtgttcacaggttgctccgggctatgaaatagaaaaatgaatccgttgaagcctgcttttttatactaagttggcattataaaaaagcatcgcttatcaatttgttgcaacgaacaggtcattatcagtcaaaataaaatcattatttgatttcaattttgtcccactccctgcctctgtcatcacgatactgtgatgccatggtgtccgacttgtgcccgagaagatgttgagcaaacttatcgcttatctgcttctcatagagtcttgcagacaaactgcgcaactcgtgaaaggtaggtggatccccttcgaaggaaagacctgatgcttttcgtgcgcgcataaaataccttgatactgtgccggatgaaagcggttcacgacgagtagatgcaattatggtttctccgccaagaatctctttgcatttatcaagtgtttccttcattgatatcccgagagcatcaacatgcaatgttgtagggatggcaatttttacgcctgttttgctttgctcgacataaagatatccatctacgatatcagaccacttcatttcgcataaatcaccaactcgttgcccggtaacaacagccagttccattgcaagtctgagccaacatggtgatgattctgctgtttgataaattttcaggtattcgtcagccgtaagtcttgatctccttacctctgattttgctgcgcgagtggcagcgaccggttttgttgttatatggccttcagctattgcctctcggaatgcatcgctcagtgttgatctgattaacttggctgatgccgccttgccctcgtctatgtatccattgagcattgccgcaatttcttttgtggtgatgtcttcaagtggagcatcaggcagccccctccttattgctttaattttgctcatgtaatttatgagtgtcttctgcttgattcctctgctggcgaggattttttcgtagcgatcaagccatgaatgtaacgtaacagaattatcactgttgattctcgctgtcagaggcttgtgtttgtgtcctgaaaataactcaatgttggcctgtatagcttcagtgattgcgattcgcctgtctcggcctaatccaaactctttacccgtccttgggtccctgtagcagtaatatccattgtttcttatataaaggttagggggtaaatcccggcgctcatgacttcgccttcttcccatttctgatcctcttcaaaaggctacctgttactggtcgatttaagtcaacctttaccgctgattcgtggaacaaatactctcttccatccttaaccggaggagggaatatcctgcactcgcgtacccatcgacgaactgtttcaaggctccttgggcgtcgctggcgtgcgttccactcctgaagtgtcaagtacatcgcaaagtctccgcaattactcgcaagggagcgagtattggtttattttctccaacaaaaaaggagccgaagctcctttgatgattaaaattcgaattgtctcgcccgaaggcttttcagcattggttttgcccgttcgaaaagggcgcttgcttggtcaagtcgtgtcgcctcccttagcagtacatctctgtttttcgtcaccgtgtaaaaagtttcaaacgcgatgtcatacagcttgctcgtgtatgatgagttcagttccttcaatatcgggtacagacgtttgcagatgtcctgcgcattctccatctgtacctgcatatagcaaaggaggatgatttcttcgtctgtgaattgctgcgctggttgcatgctgcgaagtttcttttcgcactcgatgaagtatcggcgtatctggcggcctttttcgttacgctcgaccatcgccgtttctttggctgtatcgagggtgaggtgatagtctttgctacggcgatcgcctccacgtcctttgatccccctgttttggtgaaccaaaatgtaatcgacatcaacggcaaagccgtattctgttatgcgatttttaatccatgtagagaagtcacgacgtacttccaaaaattcgtgtaaatcacgggcattaacgagaagagttgtttcgttggatatagtgccgttgaatacggggatgagttgactggccatttttatgtcctttgcatttgttcagatagccctgtgttcagcagggcggtcaggtacttgaacaccgtgcaaagtcggcccgtatccttaacctttcggctgtttttcggtatacgcgctacccgaccatatctgaaaaatggacataaaaaatccgcatgactgacgggtgcggtttccgctttgcaaggtgtgttcagcaccatgaagcggaatatagccccgttaatgcggtgttgtcaaatcatgtaggccttatcttgctgtaagccgcgccattcgggcttttccccacatttggggaaaactatcttgtcaaaatcatgcagcctttcgctctccttcgatgagttcctctattttgtgcactccagcctcgttgtaccgaaatgtttcaacctgcttgctggaatgcgcagatttatccaggaagaacttcccgtactgctcagttttgaggttgtttgcgttagcaatgcgaccaatcttgtttgccgttactccgagctgctctgcgacctcccctgctgagtagtaatgctcttctattgccggaagaggtattgcattaaaaccaacgagcgggttgattatgcttgccgcagcagtctgctttgcttccggcgcaagatttggcatcaaatcgaacagattggtaacagcttcaaccgtcattttcagtgttcgcgcttgacgatactcaacaagtccactcgctgatttaccgcttttaatgtgcgcttcctgcatactttcaagtttgtctacaagtgttcggcgaactgctttagattcgcgagcagcaacacgaagcgcctgcttgatagtcatggagataacatcaatgtcagccccgtttttccgacctacactttttgtgtaggtctcgccttccaattcatcctcaattttctcgatgaatttgttgttacgtactgatggctctccatataacttgcgagcttcattgaccattttcaacagcatctggctgtcgattgttacagccggaaacgaagagtgatttgcaatattgttaaccacaccttttcccctatatcgtataaaagaaatccccgcgagtgcgaggattgttattcacctttgacggcaagttgcaggttagccacggttaacctcctgcggcggttctggtagctgcatccagtgggttacctctttgagatacaggtcttcgccatcaccgtcatcccaagtgggattgccatcattaaaccagtcgccatatacgccgacctgagtgttggggatgtttggtgggtagttgtttttaaagtcagctgctaacacatagcattgtcgctctcccatttctggcattcgctcactacagcttatccaggcatccggagttaccggcactggctgggcggtataaagcggtgttatatctgcccgaaaattacatgctttatgcagccgcacccaccgttcgacttctgctttgtcagaatacataccagtgaacgtgttatattcacggtcaatttgcgtgaaggttaccttccacgccaccggctctgctgtcagcgatgccagagcaatttcataagcacggcgttcaacattgtctcgcacatccaaactgctgatacgctctttgatttctttaatcagttctttgtcgttcacttatgcctccgattcccggatgtcacccaaatcaacgctacaatgccaaccagtgcaacgagcgcaaaactatcaagcatctccaacctctttaacggtaactgtctgtgcctccagttctgctatgcgcttttctgaggcttcaagtaacgcctgcttatcgcgtagcgcttctgaggtgtactggcaatagcggacactaccatttgttctttttttaagcagccatctgatgatatttttccctgaaggctgccggggagatattccccagacgagagtgacgacgctgacgattgtagaaaatctcaatgtattcccgtattactgagatggcttcatcccggttattaaaacgatagtggctcaggctctcatttttcagcgttccccagaagctttccatcggagcgttgtcgtaacagttacctttacgcgacattgatgttttcagaccagactgctcctgtatgacccggtaatcgtatgcgcagtactgtgaacctcgatcagagtggtggattagcccggcaggtgggcgctggctcctgagcgccataaacagggctttacctgtcagctcttttgtcatgcgctctcccatggcgtagccgacaatttcgcacgtataaacatctttgatgccagcgaggtacaaccatccctcctgtgtggcaacatacgtcaggtccgccacccagacctgatttggtgctgtaggagcgaacgtctggttcagcagatttggcgcaactggcagattgtggttcgagttcgtagtcgctctgaacttgcgtttctgcttacagcgtagccttagctccttacgaagacgtgccagtcggtcacgaccaacgatgatgccattctctgccagctccgtctggagccgccgggttccatatgtttcgcgagtgcggatatgtgccaccttaatctccagttttagccgctcatcactttgttttctgtctgagggttcatgctgtacccagttgtaataaccgctcctggatacaccaaatacctgacacatcgcttcaatgggaaattgttgtcgccattgttcgattaacgcgtatttttcagcgactcctgtgcaaaatacgctgttgctttttttaatatatctcgctcaaggcgagcttcatttaacgccttacgcagttgcagaatttcagattccagttcagccaccgtgcgggaaccaggagtaccgagcccttttctggcggcggtaacccattgtcctaaagtgccttcaggaagagataatcgggaagcgccttcactgatcgaaagttgattttcaagaaccgttctgacagcttcggctttgaactctttagagtaacgttgggtttttctgctcattattagctccttctgatgccattctatttcaggaaggagtgtccgttaaactcaggctacctcattattctgaaatcccgggtaaacaccccggaagtggtgatgcacactgttgctgatgtgatgacaggaaacgatggtgaatactgtttccatgcgcggactggaaaatatggtgtgtatctgaaaccgggctggcacaacgagtacaacgttggcgacattgctgtatatgaggactcaaagcccggcacgctgaatgactttctgattgctcctgatgagggcgacctgaaaccggatgtcgtcaaacgctttgaggaaatggtggcgcaggcgcagcagagcgccggggccgcagccggaaacgcacagcagacggcgcaggatgtggcggcagccgcaggttatgcccgcgcagcagagcaggccaaaaatgacattgatgctgcgctgaccggcactctgaaaacggctaaccatctgtctgaaatcgcagcagcaggcgaaaaggcacaacagaagtcccgggataatctggggctgaaaagtgcggccacgatggaagcacagagcgacatttacgaccggacaaaaggccgtctggcgatacccggcgcattcggctttgggtgtgcttttctgcctgaagatgttatccgttttgacactaagagtgatttcctggcctgggtaaggaatgcgctgccaggtgaatattccgttgctggcccctacgacatcatcatacccgacacacggtttgaaggggtgctcagcatccggtggactgatgcacgccctgagacaacagaaccgcggtacagagccaaatcccttactttttacggcattaacggccccatttatcacacccgctactgctactggcccatatccagactgactggctgggtgaaaataaatataaccacagaagatattatttacagaatcgtggcgagctctgtccgcaacagatggggagaccctgacattggcgggctgattattgctgcgtaccagggagaagctgacggtgataaagtcatcagacttgtcagggggcagtcatacagaggctcacgactgggaccggtggggatttcagtgcccagtactcccaccggaacgtatatagcatccccacaatttttcattacgggatgttcagagcattcattaccggggtcatattgcgccctgtccggggtgccggatgcacatgtctctggcgcaatgcccgggctttttattcgcacatcgtgaggaatgcaccgtggaaattaaaaaaatcattaatccccgttataccgaaagtggcgcagtagactgtgacgttttttttgacgacagggaccaggcagtcccctacacagccaccgctgatgatgtcgcaccgacgggtcagcaaatctggcaggaactgcaaagtggcaaatggggtgagatagccccattcactgtgacaccagaaatgctggaagcggccagagaggccaggcgtcaggaaattgaagcatggcgcgcagaacaggaggcgaagccgttcacgtttgaatggaacggtcgtatctggaatgctggtcccgactcactgggccgcctgtccccggtagtcatgctggcaaaatctgtcacagcacaaacacatatggcgtggagcgatgccgataatcagcaggtgaaactgtcgatgccggaactggaagaactggcggcagcaatggtgcaggcgcaggtcgatcgcaacgatgagatttatcgccgtcagcgtgaaatgaaagaggagctgagcggtctggatgatttggcttcaattcgggcgtttgacgttgagtaatgaataagccgcaactggcggaatcacagaagaccgctttgcttaccgaagcggagtctgtcatccggccgcgggggcgtgctgtcaggctgaacagggaaacggatgaatccggggaggcccgggggcgggcctctgtttttccggagtcagtccggtctgtggtttatgcaatgtgattatgaatggtgcagttgtgagccgttttcaggcaatcgcagggccagtacctcgtcagtcagctgacggtaaatctgctgttcagtctcacgcatcacctgtgcaccggcttccctctccgcatccgcatcaccgctcagacctgatgctttcagccggtcagccaccctctgagggtactcattctccagcatctcatatttctgctcttctgccagcgcccagcggtcagcttccgtacgcttcagtacagcatgccatggtccccagagggagaaccagtccgtaaattcattctcttcacggcttctgaccatggcttcggcagtgcggaggtcatttgctgtcactcccgacacgccatagaaacgcatttccttcacggcagtggagagctgaagtttctctgcgagcatggtctggaaggccaggtagacttctatctcatccacaaaatggagagttctgactttatcccgggcaatgtcctccagaatttcgaggcggaacatttccctgcccagggagagcagagcgccggtatcattatcgaaaaggccttcagatgcctgatggaccaggagggttttccggagattgttccatgtgagcgcgacacggtcctcacagctctcagtggcatcagcagcaacagcgaaagactgctgtcgaagctccgcagaggcactgagtttttccagccatgcagcgacctgttcacggaatccggaggtattgcgtgcagagacggtatcggaaaggcggtcaaggaacgcggaaaaggtgttggcgtgctcttcatgttcaaaagcatgccatatctgtgatacatcagattgtttgttttccgggaaccatgctgtcacggcatcagccagggggcgatggagtgtattctgttgtccgtcactcatggagaagtaaatccgtgggccgtggtagtccggcgaagaggttaatctttgcagggcttgcagagtgcgagtcgacaatggattgttataaatattaacatctgcataaatgtgcagattcatgatactgtctggcaatgtgttcagctgattgttagggatatatagtgattgcagacgttgtggaagttcgggcagtctgtgtagttggttttccccaacgtttaaaagcctcagattttgaggaaggggcggtagctcttgtaatctgttatcaaaagcacttagttcctgtagttcacatggtaattctggtaaggcagtaagctggttgttgccaacagaaagtttttgtagagccgggggaagatcaggtagcgtctccaggctattgagaagggctgagagtgactgcaaggaagatggaagagaaggcaaacatgttaaaactctgttaagtgaaacatcaagagcgaccaggtgaggcggaagagccgggagcctgctcagtctgttatcgctggctttaagtacagttaaggacggagggagttctggcagagagcgtagctcattgctagagatgttaagttcttgtatgtgcgggggcaggtatgggagagagcgtaatctgagtaaacttaaattgagggctggctcttgaaaagccagacatattttcagtaatcgaactgcctgtgttcggtcttctgttgcagcaccttccttggcccagttatcccagatgcggtgataatccgtgatattttgctcttctacggataaacgggatatacatcctaaaccacaaaaggagcggaaaaaagaaggattgtgggcaggtttcatttattattgatcctcattgtttatatattaatatgttcgtgcaaatggagtgaggattctttaaaaaaacgcgcctgtaaatagttaagaacaggaagaactgttggggatgtggctggccgaaaatgaaggggtgaagttctggctcaatgtgctgactgaactgaaaaaacgcggttggtcgccctaccttttcatcaagccagtagtctgcccaccactgcatcatttctctgcgcttatcgagatactgagcatggttgtaaattcagctaacccagtgcgttgacaaaaaattagcgcaagaggacaaaaaatcaccttgcgctaatgctctgtatcaggtcactaataccatctaagtggttgattcatagtgactggatatgttgtgttttgcagtattatgcagtctattttttaagctaaatgtattataatgcattgatattaatgatttttactgtttctcgttcagctttttatactaacttgagcgaaacgggaaggtaaaaagacaaaaagttgtttttaatacctttaagtgataccagatggcattgcgccatctggcagagtgattaactaaacatcgcagtaatcgaggcgcttgccagagagtggaaatgaacgttaaacccgaccatcgcgccgctggcaccttcatcgacatcaatacgttctatatccagcgcgtgaacggtaaaaatgtagcgatgagtttcgcctttcggcggtgctgcgccatcgtacccggttttaccaaagtcggtacgcgtctgcaaaacgccgtctggcattgctaccagaccagagccaaacccttgcggtaatacgcgggtatcagcgggtaagttaacaactacccagtgccaccagccggagccggttggcgcatccgggtcgtagcaggtgacaacaaaacttttcgttcccgcaggaacatcatcccacgccagatgcggtgaaatattatcgccatcgtaacccatgccgttaaagacatgacgatgcggcaatttatcgccatcgcgcagatcgttactgatgagtttcatgaaccctcctttcttgtttgcagaaagtgtagccagaaaccctcacgcggacttctcgttattggcaaaaaaatgtttcatcctgtaccgcgcggttaaccgctgcggtcagacgctgcaactgttgcgggagaataatatagggcggcatcaggtaaatcagtttgccaaaaggccggatccagacaccctgttcgacaaagaatttttgcagcgccgccatattcaccggatgagtggtttcgaccacgccaatggcccccagtacgcgcacatcggcaaccatttcggcatcacgggcgggggcaagttgctcgcgcagctgtacttcaatatccgccacctgttgctgccagtcgccagattcgagaatcgccaggctggcgtttgctgccgcgcaggccagcggattgcccataaaagttggcccatgcataaagcaaccggcttcaccgttactgatggtttctgcaacctcgcgcgtggtgagtgtggcggaaagggtcattgtgccgccggttaaggctttaccgaggcacaaaatgtccggcgcgatttctgcatgttcacaggcaaacagtttcccggtacgaccaaatccagtggcgatctcgtcggcaatcagcaagataccttcgcgatcgcatattttgcggattcgttttaaccattccggatggtacatgcgcatcccgcctgcgccctggacaatcggctcaatgatcaccgccgcgatttcatgacgatgcgccgccatcaggcgggcaaagcccaccatatcgcgctcatcccattcgccatccatacggctttgtggggcgggagcaaacaagttttctggcagatagcctttccacaggctgtgcattgagttgtccggatcgcacaccgacatcgcgccaaaggtatcgccatgataaccattgcggaaggtcagaaaacgctggcgcgcttcgcctttggcttgccagtactgcaacgccattttcatcgccacttccaccgctacggaaccggagtccgcgagaaaaacgcactccagcggttgcggcgtcatcgccaccagtttgcggcacagctcaatggctggcgcatgggtgataccgccaaacatcacatgcgacatggcatcaatttgcgacttcatcgccgcattaagctgcgggtgattgtagccgtggatcgccgcccaccaggacgacataccgtcaaccaggcgtctgccgtcagacaaaatcagctcgcaaccttcggcgctcaccaccggataaaccggcagcggggaggtcatggatgtgtatgggtgccagatatggcgttggtcaaaggcaagatcgtccgttgtcataatcgacttgtaaaccaaattgaaaagatttaggtttacaagtctacaccgaattaacaacaaaaaacacgttttggagaagccccatggctcaccgcccacgctggaccttgtcgcaagtcacagaattatttgaaaaaccgttgctggatctgctgtttgaagcgcagcaggtccatcgccagcatttcgatcctcgtcaggtccaggtcagcacgttgctgtcgattaagaccggagcttgtccggaagattgcaaatactgcccgcaaagctcacgctacaaaaccgggctggaagccgagcggttgatggaagttgaacaggtgctggagtcggcgcgcaaagcgaaagcggcaggatcgacgcgcttctgtatgggcgcggcgtggaagaatccccacgaacgcgatatgccgtacctggaacaaatggtgcagggggtaaaagcgatggggctggaggcgtgtatgacgctgggcacgttgagtgaatctcaggcgcagcgcctcgcgaacgccgggctggattattacaaccacaacctggacacctcgccggagttttacggcaatatcatcaccacccgcacttatcaggaacgcctcgatacgctggaaaaagtgcgcgatgccgggatcaaagtctgttctggcggcattgttggcttaggcgaaacggtaaaagatcgcgccggattattgctgcaactggcaaacctgccgacgccgccggaaagcgtaccaatcaacatgctggtgaaggtgaaaggcacgccactggcggataacgatgatgtcgatgcctttgattttattcgcactattgcggtagcgcggatcatgatgccgacctcttacgtgcgcctttctgccggacgcgagcagatgaatgaacagactcaggcgatgtgctttatggctggcgcaaactcgattttctacggttgcaaactgctgaccacgccgaatccggaagaagataaagacctgcaactgttccgcaaactggggctaaatccgcagcaaactgccgtgctggcaggggataacgaacaacagcaacgtcttgaacaggcgctgatgaccccggacaccgacgaatattacaacgcggcagcattatgagctggcaggagaaaatcaacgcggcgctcgatgcacggcgtactgccgatgccctgcgtcgccgttatccggtggcgcaaggagccggacgctggctggtggcggatgatcgccagtatctgaacttttccagtaacgattatttaggtttaagccatcatccgcaaattatccgcgcctggcagcagggcgcagaaaagtttggtgtaggtagcggcggttccgggcatgtcagcggttatagcgtggtgcatcaggcgctggaagaagaactggccgagtggcttggctattcgcgggcgctgctgtttatctctggttttgccgcgaatcaggcagtcattgccgcgatgatggcgaaagaggaccgtattgttgccgaccggcttagccatgcctccttgctggaggctgccagtttaagcccgtcgcagcttcgccgttttactcataacgatgtcgctcatctggcgcgactgcttgcttccccctgtccggggcagcaactggtggtgacagaaggcgtgttcagcatggacggcgatagcgcgccactggcggaaatccagcaggtaacgcaacagcacaatggctggttgatggtcgatgatgcccacggcacgggcgttatcggggagcaggggcgcggcagctgctggctgcaaaaggtaaaaccagaattgctggtggtgacttttggcaaaggatttggcgtcagtggggctgcggtgctttgctccagtacggtggcggattatctgctgcaattcgcccgccaccttatctacagcaccagtatgccgcccgctcaggcgcaggcattacgtgcgtcgctggcggtcattcgccgtgatgagggggatgcacggcgcgaaaaactggtgtcactcattgcgcgttttcgtgccggagtacaggatttgccgtttacgcttgctgattcatgcagcgccatccagccattgatcgtcggtgataacagccgtgcgttacaactggcagaaaaactgcgccagcaaggctgctgggtcacggcgattcgcccgccaaccgtacccgctggtactgcgcgactgcgcttaacgctaaccgcagcgcatgaaatgcaggatatcgaccgtctgctggaggtgctgcatggcaacggttaataaacaagccattgcagcggcatttggtcgggcagccgcgcactatgagcaacacgcagagttacagcgccggagtgctgacgtcttactggcaatgctcccacagcgtaaatacacccacgtactggacgcggggtgtgggccaggctggatgagccgccactggcgagagcgtcacgcacaggtgacggcgttagatctctcaccgccaatgcttgtgcaagcccgccagaaagatgctgcagaccattatctggcgggagatatcgaatccctgccgttagcgactgcgacgttcgatcttgcatggagcaatctcgcggtgcagtggtgcggtaatttatccacggcactccgcgagctgtatcgggtggtgcgccccggaggcgtggtggcgtttaccacgctggtgcagggatcgttacccgaactgcatcaggcgtggcaggcggtggacgagcgtccgcatgctaatcgctttttaccgccagatgaaatcgaacagtcgctgaacggcgtgcattatcaacatcatattcagcccatcacactatggtttgatgatgcgctcagtgccatgcgttcgctgaaaggcatcggtgctacgcatcttcatgaagggcgcgacccgcgaatattaacgcgttcgcaattgcagcgattgcaactggcctggccgcaacaacaggggcgatatcctctgacgtatcatctttttttgggagtgattgctcgtgagtaaacgttattttgtcaccggaacggataccgaagtggggaaaaccgtcgccagttgtgcacttttacaagccgcgaaggcagtaggttatcggacggcaggttataaaccggtcgcctctggcagcgaaaagaccccggaaggcttacgtaatagtgacgcgctggcgttacagcacaacagcagcctgcagctggattacgcaacagtaaatccttacaccttcgcagaacccacttcgccgcacatcatcagcgcgcaagagggcaggccgatagaatcattggtaatgagcgccggattacgcgcgcttgaacaacaggctgactgggtgttagtggaaggtgctggcggctggtttacgccgctttctgacactttcacttttgcagattgggtaacacaggaacaactgccggtgatactggtagttggtgtgaaactcggctgtattaatcacgcgatgttgactgcgcaggcaatacaacacgccggactgactctggcgggttgggtggcgaacgatgttacgcctccgggaaaacgtcacgctgaatatatgaccacgctcacccgcatgattcccgcgccgctgctgggagagatcccctggcttgcagaaaatgcggcaaccggaaagtacataaaccttgccttgttgtagccattctgtatttggttaaattgcgagcgagatcgcgtcttcgattgactgcaatttaaccaattaaattctaaaataatcacgaaaaaaattttacttccgcctcatgcggcgaatgtgggaattgcccaggcggcgggggataggggctggagacagttatccactattcctgtggataaccatgtgtattagagttagaaaacacgaggcaagcgagagaatacgcggcttgcacgcgaattggcgttaaagacggctcaaagaaatatcttttattttttaactggttagataaatgcaatggcagtcactgaacaggcatctcttgccataaaactgtcatcactcatcttgacaaatgttaaaaaagccgttgctttggggataacccggtaaggccggagttttatctcgccacagagtaaattttgctcatgattgacagcggagtttacgctgtatcagaaatattatggtgatgaactgtttttttatccagtataatttgttggcataattaagtacgacgagtaaaattacatacctgcccgcccaactccttcaggtagcgactcatgagtaaaccgttcaaactgaattccgcttttaaaccttctggcgatcagccagaggcgattcgacgtctcgaagaggggctggaagatggcctggcgcaccagacgttacttggcgtgactggctcagggaaaaccttcaccattgccaatgtcattgctgaccttcagcgcccaaccatggtacttgcgcccaacaaaacgctggcggcccagctgtatggcgaaatgaaagagttcttcccggaaaacgcggtggagtatttcgtctcctactacgactactatcagccggaagcctatgtaccgagttccgacactttcattgagaaagatgcctcggttaacgaacatattgagcagatgcgtttatccgccaccaaagcgatgctggagcggcgtgatgtggttgtagtggcctctgtttccgcgatttatggtctgggcgatcctgatttatatctcaagatgatgctccatctcacggtcggtatgattatcgatcagcgcgcgattctgcgccgactggcggagctgcaatacgctcgtaatgatcaagcattccagcgtggtactttccgcgttcgtggcgaggtgatagatatcttcccggcagaatcggatgacattgcacttcgcgtggaactgtttgacgaggaagtggaacgattgtcgttatttgacccgctgaccgggcagattgtttccactattccacgttttaccatctacccgaaaacgcactacgtcacaccgcgcgagcgcatcgtacaggcgatggaggagatcaaagaagaactggccgccagacgcaaagtgctgttggaaaacaacaaactgctggaagagcagcggctgacccagcgtacccagtttgatctggagatgatgaacgagctgggctactgttcggggattgaaaactactcgcgcttcctctccggtcgtggaccgggtgagccaccgccgacgctgtttgattacctgcctgccgatgggctgctggtggtcgatgaatctcacgtcaccattccacaaattggcggcatgtatcgcggtgaccgggcgcgtaaagagacactggtggagtacggcttccgcctgccatcagcgctggataaccgtccgcttaagtttgaagagttcgaagcattagcgccgcaaaccatctatgtttcggcgacgccgggtaattacgagctggaaaaatccggcggcgatgtggtggatcaggtggtgcgtccaaccggattgcttgacccgattatcgaagtgcggccggtggcgacacaggttgatgatcttctttcggagattcgtcagcgagcggcaattaacgaacgcgtactggtcaccacactgaccaagcggatggcggaagatcttaccgaatatctcgaagaacatggcgagcgcgtgcgttatcttcattcagatatcgacaccgtcgaacgtatggagattatccgcgacttgcgtctgggtgagttcgacgtgctggtagggatcaacttactgcgcgaaggtctggatatgccggaagtgtcgctggtggcgatcctcgacgctgacaaagaaggcttcctgcgttccgaacgttcgttgatccagactattggtcgtgcggcacgtaacgttaacggtaaagcgattctctacggcgataagatcaccccatcaatggcgaaagcgattggcgaaaccgaacgtcgccgtgagaaacagcagaagtacaacgaggaacacggaattacgccgcaaggcttgaacaagaaagtggtcgatatcctggcgctggggcagaacattgccaaaaccaaagcgaagggcagaggaaaatcgcgcccgattgttgagccggataatgtgccgatggatatgtcgcctaaagcgttgcaacagaaaatccatgagctggaagggttaatgatgcaacacgcgcagaatctggagttcgaagaagcggcacaaattcgtgaccagttgcatcagctgcgtgagctgtttatcgcggcttcgtgacaggataacgaagaagacagatgacaaaagcaaaattgcctgatgtgctacgcttatcaggcctacatgatctctgcaatacattgaattagcgcggtttgtaggccggataaggcgttcacgccgcatccggcataaacaacgcgcactttgtcttcaataggaagccggaatttttcttcggatttccgttaacctaaagcctgtaacgccttttccagcgcgttatgtaacaactggcggtcatgacgatacggaatatcgctggcctccagtacctcctgaatcacaatccgctctttcaccgccgagacatccacttttggcccgacgatgaccgcatcaatgacctttttaccaacatactgctccataattgccagcttgctttccagcttcaaattagccgcaggtaaactcaactcacgccccagattgccgatatagaccatcggcgctggcgtgcggcgtaatgcctgggcgatttccttcagcagcagaattggcatcaggctggtataaaaactgccaggcccaataatgatgagatccgcttcattgatagcgtgaaccgcctcacgcgttgcgggtacattcggcgttaataataactcttgaatcggcgtagttaactggtcgatattgacctcgccgtaaacttcatgcccctgatcgtcaatcgccatcagatcgacgggatgctctgacattggaatcaaatgcgtatccactttcagcagattacgaattaaattgatggcttccagaggccgcacgctaaggtgatccagcgcctttaacatcaagtttccgagattatgaccggaaagttcgccattgccgccaaaacggtattcaaacatcgcggaggcgacgctcggttccgttatcagttggttgaggcagttgcgcatatcgccccaggcaatgccgccttctgaacggcgaatacgccccgtcgagccaccattatccgtggtggtgacgatacccgttaaacgagaacccaaagacgaaagtgatgagagaacgcgtcccagtccatgccctccgccgagagcaacgacacgatcaagatcagccagcgtacgattgcgcatatagtttcctggagtcagattatccgcgctacagtagcgcaaattgcggggaaacagcaattaacctgccaatattgaggatacaaactattttcttctacctctaaaggacgatgcacgctatgcctccctgatgatgtatatcaaagtaaaactgccattttcccttattctgtagcgaaatagcacgatcatgacgctatatacatgattacatagcgaaagtgtggatggtaaaaatctcatttacacgctagtatcggcttaaccactaaacactctagcctctgcacctgggtcaactgatacggtgctttggccgtgacaatgctcgtaaagattgccaccagggcgaaggaagaaatgacttcgcctcccgtatctggaaaggtgtacatggcttcacaactgactgatgcatttgcgcgtaagttttactacttgcgcctgtcgattaccgatgtgtgtaactttcgttgcacctactgcctgccggatggctacaaaccgagcggcgtcaccaataaaggctttcttaccgtcgatgaaattcgccgggttacgcgcgccttcgccagtctgggcaccgaaaaagtgcgcctgacaggaggagagccgtctttacgccgcgactttaccgatatcatcgccgctgtgcgggaaaacgacgctatccgccagattgcggtcaccaccaatggttaccgtctggaacgcgatgtggcgaactggcgcgatgcgggacttactggcattaacgtcagtgtcgacagtctggacgcccgccagtttcacgctattaccgggcaggataaattcaaccaggtcatggcagggatcgatgctgcatttgaggtcggttttgagaaggtcaaagtcaataccgtgctgatgcgtgatgttaatcatcaccagctcgacacctttctgaactggatccagcatcgccctatccagctgcgtttcatcgaactgatggaaacgggcgagggcagtgagctcttccgtaagcatcacatctctggtcaggttctgcgtgacgagctactgcgtcgcggctggatccaccaattacgtcaacgcagcgacggtcccgcgcaagtcttttgccatccagattacgccggagagattggccttatcatgccgtatgaaaaagacttctgcgccacttgcaaccgcctgcgcgtttcctccattggtaaactccatctctgcctgtttggtgaaggcggcgttaacctgcgcgatctgctggaagacgatacccagcaacaggcgctggaagcgcgtatttcagcggcgctgcgggagaagaaacagacccatttcctgcatcaaaacaacaccggtattacgcaaaacttatcgtacattggcggctaaaacgtcaaaaggagagatcagatgagtcaggtaagcactgaatttatcccgacccgtattgctattcttacggtttctaatcgtcgcggtgaagaagacgatacctccggtcactatttgcgcgattcggcgcaagaagcgggccatcacgttgtcgataaagccattgtgaaagaaaaccgctacgctattcgcgctcaggtatctgcgtggatcgccagcgacgatgtacaagtggtgttgattacgggggggactggcctgacggaaggtgatcaggctcccgaagcattgctgccgttgttcgaccgtgaagttgaaggttttggtgaagtgttccggatgttgtcgtttgaagagattggcacttccacgttgcaatctcgtgcggtagcgggcgtcgccaacaaaacgctgattttcgccatgccgggttcgaccaaagcgtgccgtaccgcatgggaaaatatcatcgcgccgcagctggatgcccgtacgcgtccgtgtaatttccatccacatttgaagaaataagtatgtcgcaactgacccatatcaacgccgctggcgaagcgcacatggtggatgtctccgccaaagcggaaaccgtgcgtgaagcgcgggcggaagcctttgtcaccatgcgcagcgagacgctggcgatgattattgatggtcgccaccacaaaggcgacgtatttgccactgcgcgtattgtcggtattcaggcggcaaaacgcacctgggatctgatcccgctgtgtcacccgctgatgctcagcaaagttgaagtcaatttacaggccgagccggagcacaatcgggtgcgtatagaaaccttatgccgcctgaccgggaaaaccggtgtcgaaatggaagcgttaaccgcggcctccgtggcggcgctgaccatttatgacatgtgcaaagcggtgcaaaaagatatggtgattggtccggtacgtttgctggcgaagagcggcggcaagtcgggtgactttaaggtggaagcggatgattaaagttctttttttcgcccaggtgcgcgagttggtgggaacagatgcaaccgaagtggctgcggattacccaaccgttgaagcgttacgccagcacctggctgcgcagagcgatcgctgggcgctggcgctggaagatggcaaattgctggctgccgtcaaccagacgctggtgagttttgaccatccgctgactgacggcgacgaagtagctttcttcccgccggtaaccggaggttaagatggcagaaaccaaaattgttgtcggcccgcagccgttcagcgtaggagaagagtacccgtggctggctgagcgtgacgaagacggtgcagtggtcacgtttaccggtaaggtgcgcaaccataacctgggtgacagcgtcaaagcattaaccctcgaacactatccggggatgactgaaaaagcactggcagaaatcgttgatgaagcgcgtaaccgctggccgctggggcgcgtcacggtgattcaccgcatcggggaattatggccgggcgatgaaatcgtttttgtcggtgtcaccagtgcgcatcgcagcagtgcgtttgaagccgggcagtttattatggattatctcaaaacccgcgcaccgttctggaagcgcgaagccacgccggaaggcgaccgctgggttgaagcccgggagagcgatcagcaggcggcaaaacgctggtagttttttgttagccggataaggcaccgctgcgtccggcaatttcaccgctcagtacatgcgtttacgctgcgtcgatgcacagcctcatcattttgcagtatccttaagatattccttatatcttcaggagatcgtcatggacagattcccacgttctgattcaatcgtacaaccccgggctggcttgcaaacttatatggcgcaagtctatggctggatgaccgttggcttgttgctgaccgcatttgttgcctggtatgcggctaattccgcggccgtgatggagctgttgttcactaaccgtgtctttttaatcggtctgatcatcgcgcaattagcattggttattgtgttatcagcgatgattcaaaagctgagcgcaggtgtaacgacgatgctctttatgctttattcggcgctgacgggtcttacgctttccagtatattcattgtctataccgctgcttctatcgccagtactttcgtcgttactgccgggatgttcggcgcaatgagcctgtacggttacaccacgaagcgcgatttaagtggctttggcaatatgctgtttatggcgttaatcggcattgtgctggcatcgctggtcaacttctggctgaaaagcgaagcattgatgtgggcagttacctacatcggcgtgattgtctttgtcggattgacggcgtatgacactcagaaattgaaaaatatgggtgagcagattgatacccgcgacacgtcgaacctgcgcaaatattccattcttggcgcgttaaccttgtatctggacttcatcaacctgttcctgatgttgttacggatcttcggcaaccgccgttaattctttttcaccatcactatcccggccatgtgtcgggatttttttcttactaaaaacgacacttaacaagtaccaggtataaaatatgccttatgagcgagcggaatcgttttccgtatccataaatacaaaagtattttgtatgcgtggttttaaatttattgatggtgaatattaatattttttctaaggacaactaaaagaatggaatcatactcgcaaaacagcaataaattagattttcagcacgaggccaggatataaaacggtatatggctcattaccgctttaggtttggtggcaaccgcaggactagcctggggagctaagtatctcgaaattacggcaaccaaatatgattcaccaccaatgtatgtcgctatagggttattattactttgtatgtatggcttaagtaaggatatcaacaagataaatgccgccatcgcgggcgtaatatatctgtttttactctctttggtggcgattgtcgttgcaagtttagttcctgtatatgccattatcatcgtgttcagcactgcgggcgcgatgtttttaatcagtatgctggccggtttattatttaatgttgagcctggttctcaccgttttatcattatgatgacgttgacagggttggccctggtaatcatcgtgaatgcggcattaatgagtgaacggcccatttgggtaataagttgcttaatgattgtgttatggccaggcattatctcgcatggacgaaataagctccttgaactggcaggaaaatgccatagtgaagagttgtggagtccggttcgttgcgcttttacaggtgcattaacactctattactattttatcggcttctttgggatacttgccgcgatagctataacgcttgtctggcaaaggcatacgtgtttttttcattagccgtaaatgcacatactaaagaacttaactaaacttcacatcgccgcttcatttttcgcccgtagcccagtacaaagaaatagttcacgctttgaccaagtaacagccagataatcgcccccattaccatccagttaacgctggaaatcagcatctgagcgagggcgaatttccatgaaggcagcaccagcttttgccctttgatggtcatatggcggtgcttcgcgaaagcgcaaaaccacaaataaaccgcgataatcatcagtaagccaatgccgagaatacgcagcgtagtttgatcgacataccagtgatccggcaactccaccacgcctgcggtaaagataatccctgccagtaaaatatagcccagccagttggtggtaatactgagcgagaaaatccgcgtaatagtgctaccgggcaaccccagacgagagtacaaacgatagcgcataccaatgccgccgacccaggtactgagcgtcaggttgaaggcgtagcagataaacgacaccagcatcacctggcgcttcgccagtttgtgaccgcagtaaaagcgggcgagcaggtcatagcagccgtaaatcagatagctgacgaccaccagcgaccgcactaagcagcgcaacgcgattgtagtcgcggatgaccttccagacctcttcccagtccacttttttggcgtagaccaccagcaacacaatcaccgcgataaaaaacagccaggtgaggatcttctttgctaagcgccagcgcgggtgtgatttactcatcagggttttacccccgtgttttcagtttctacccgatcctgcgtttccattgtcggttgtgcgggcggatcaacctgcgccagacgtggcgtgtgtgccggaagccagccaaccagcgccgggaagtggcgtaaaaagtggaacgccagcacgcttttggtcaggttccaccaggtgcgtttgggcagcatggtttcatccacctgctgacaatctgcggcgataatgccgttcagattatcgcgcagcgtctggttaaaattacgatcgtggatgatgacatttgcttcgagattcagtgacaaactgagcggatcgagattactggaccctactgtcgcccagtgatcgtccatcaatgctactttgccgtggagcgggcggcggcggtactcaaacacctgaacgccgcctttaaccagatagttatacagcaagcgcgcgccgactctgacaatcggcatatccggttcgccctgaatgatcagtttgatccgcaccccgcggcgtgccgctttacgcaaggcgtgtaaaaatcgatagccggggaagaagtaggcgttggcgataatgacttcccgccgcgcctgagtgagcattttcagatagtggcgttctatatcatcgcggtgttcttcgttatcgcgccagaccagcaatacctgcgcgtctcccggctggcggttctcttccgctttgtgatgacgtcgccaccagcgtcgtgccgcgctctgtccaggcaggttttccagctcaaactggagaatatcttcgacaatcggcccttcaaggcgtaccgcgtaatcctgtttagcctctggaccgtagctggacatatgctcggcggagtaattcagcccgccaataaaggcgatacgcgcgtcgatcaccacaattttgcgatgcatccggcgaaacacattggtgcgcataccaaaaaggcgagggcggggatcgtagtagcggaacactacgccagctgccgtcagttcattgacaaactcatcgctgagatccggcgaaccgtagccatccagcaagacttccgctttaaccccgcgttgcgctgctgccagtagtgccgcatgcagctgtttgccgacgttatcctcaaaccagataaacgtttcaagaatgatgcgttcttgtgcctcgccaatcgccttaaacaccgcgggataatattgctcgccgttttccagcaactggatcttattgccttcgcgccagctacatttcataaatgaatctccgcacttaaaggggcatgatcagaaaggtgtcgccatgtccgcagcggcaacgcggttggcgcgctggcgctggcatttttgacgtagatcctgtccagtcgtagtagaggaaattgcaccggaaacgtgcgcgccgggcgtccgtgggcgcgggtaaaaatctcatccagtccggcctgcacttttaacggatgattagctttttgccgccagtcattgaaatcacccgccaccaataccggttcgccgtccggtagctcattcacccattcggcgagcatcgcaagctgcgcctgacggtgcgcctcacgcaggcccagatgtacgcacatcacatgaatcgcttttccggtcatcggcggcacaatgcggcagtagagcacgccgcgcttttccgcaccatcgaccgaaacatcgcgattctcataatgttcaatgggataacgcgacagtacggcgttgccgtgatgcccttccgggtatacggcattgcgaccgtaggcaaaatcgctccacatagtgtcggcgagaaactcgtagtgcgaggtatcgggccagttttccacatgcagcggatgaacttcgtgcgcgcccatcacttcctgcaggcaaacaatatcggcgctgacggtacgcacggcatcgcgaagttccggcaaaatgaagcgtcggttaaacgcggtaaagcctttgtgaatgttgatggtgagcaccttgaacgaaaattgttgtgtttgatcgggcataattttcctgtctttgcctcttatctcattgaaatagtgtagtcggcgtcacaaaaaggtgcggtcttacggaattttccgtaaagttcggtactctgagtaagtagagataaattcttcaggagagaagccatgaagtggcaacaacgtgttcgtgtcgcaacgggtctaagttgctggcagattatgttgcatttactggtagtggcgctgctggtggtgggctggatgagtaagactctggttcacgtcggcgtgggattatgcgcactgtattgtgtcacggtagtgatgatgctggtgtttcagcgccaccccgagcaacgctggcgtgaggtggcagacgtgctggaagagctgaccacgacctggtattttggcgcagcgctgattgtgctgtggctgttgtcccgcgtactggaaaacaactttttgctggcaattgcagggctggcgatccttgctggcccggcggtagtgtctttgctggcgaaagataagaagttacatcaccttacgtctaaacatcgcgtacgccgctgaccctgtcgtggccgttatcaccagtagcggccacaaactattccacacaatatccagactcgcatccttcaaataaatctgcttggtaatgtccgtaaagtggcgaatagggttaatccacgtcaggttttgcagccatactggcatgttttccaccggagaaacgtaaccggaaaggagaatggcgggcatcataaaaacaaacacgccgataaacgcctgctgttgtgtcgagcagagtgatgaaatcaacagaccgaatcccaccagcgataaaccgtaaatcaccatcgtaaagtagaacagcgccagcgatccggcgaaggggatttgatacgcccagataccaatcgccagcacaatggtggcctggaaggtggcgacaattaacgccggtacggctttgccgatgaagatctgccaggtggtgagcggcgaaaccagtagctgatcgagcgtaccttgttcacgttcgcgggcgacggaaagtgaagtgacgatcattacgccgatagtggtgatcatggcgatcagcgacggcaccacaaaccatttgtagtcaagattcgggttataccagttgcgtaccaccagctcgctgttgttaggtttcggttttccttccagcagctcctgctgataatttttgacgatctgttgcaggtagttggcggcaatttgcgcactgttggagttacgcccgtcgaggatcaactgcaacggcgcggtctggaaggtatccagtttgcgcgagaagtcagccgggaaacgcaccagtagtaacgccttttgtgtgtcgatggttgggcggatctcctgtgggcttttcagcagcagcacatgggtaaaggcgctggcgcgggcaaaacgttgggtcagctccaccgaatgctcgccgttatcttcatcgtagatggcgatggtggcgttagtcacttccagcgtggcggcgaacgggaacaggatcacctgaataagcacaggtaaaatcagaatcgcgcgggtttgtggttcgcgcagcaacgactgcaactctttgcggattaacgtccataagcgatgaaacatgctcttctccctaatccagccgacgtttggttttcagccacgtcaggccgataaacatcaccgccgaagcgatcaaaaacagcacgtttaccaccagcaccactggaatattcccggcgaggaacaggctttgcagggtgctgacgaaataacgagcgggaataatgtacgtcaccgcgcggatcaccgcgggcatactgtcgatctgaaaaataaagccggaaagcataatcgacggcaggaacgcggcgttcagggcgacctgagcggcattgaactggttgcgggtaatcgtggaaatcagcagccccatccccagggtactgagtaaaaacaggctggagataaaaaacagaataagcagcgaaccgcgatacggcacgccgagaataaacactgacaccagcatacacagcagcatcgccagcatcccgagaaagtaataagggatcagcttacacagcagcagttccgtgcgggtaatctccgtagagagcagagcctccatggtgccgcgttcccattctcgcgccaccaccagcgaggtgagaatcgcgccgatgaccgtcatgatgatggtcactgcaccggggataatgaagtgctggctaatcgccgccgggttaaaccagtagcgggtttgtacatcaataagcggttcaaaagtctgcccgttgtcctccgctcgctgcatttgccagatctgccagatctgccagatcccttcgacatacccctgtacaaagttagcggtattcggctcactgccgtcggtgatcacctgaatcggtgcggtggcgttggcgcgctccatctgttccgcaaaatccaccggaataaccaccagaccgcgaattttccccgcctgcattttggcgatcagttcctgacggttatcgctgatggtggcgtcgatgtagggcgaaccggtcatggtgtgggtgaaatccagcgccgcttcgctacgctgttccagcaagatcccgacccgcagcttgctggagtcgaggttaatgccataaccaaaaataaacagcagtagcagtgggatcactaccgcaatcagccagctactcggatcgcgaacgatctgccgcgtctctttgacgcacagcgcccgcacgcgacgccaggaaaggatcgggttactcattgctatgctccttatcccagtcgtggatcaactgaataaaggcttgctccatggtgggatcgggttgctcatcgttagccgactgtgctttcaaatcgtccggcgtaccgctggcgattaatttcccacggtacaccaggccgatgcggtcgcaatattccgcttcatccataaagtgggtggtgaccatcaccgtgacgcctttctctaccatgctgttgatatgtagccaaaattcacggcgggtgaggggatcaacgccggacgtcggttcgtcgagaaacagaatgtccggttcatgcatcagcgaacaggccagcgccagccgctgtttaaaacctaatggcagttcatcggtggcgtgggaggcgatacttttcaggccgaacgcctcgctcatgcgggagattttttcgttctgcgcccgaccgcgtaagccatacacaccagagaaaaagcgtaaattctgttcgaccgtcaggttaccgtagagcgaaaacttttgcgccatatagccgagatgctggcgcgctttaccagaactctctttcagatccatccccagtaccagcgcctgaccagaggtcggcaccagcaaaccgcacatcatcttaaaggtggtcgatttgcccgcgccgtttggccccagcaaaccaaaaatctccccgcgtttaacggcaaagttgacgtgatcggtggcggcaaaatcaccaaatttcttggtcagttctttcgcttcgatcaccgtctcgccgggtgtgccttctaccgtatgtaatattgcgcccagcggcgattccgaggttccggcaccgcccagcaaatcaataaacgcatcttcaaaacgcggcgtagtttcgttgatgttgatttccggcatcccgtcggcatggcgaatatcgtctggtgtggtctcttttttgaggatcagacgtaccgatttcccctgaatcatgccgtcgctgacctgcggcagtttcaatgcccgttgcaacagtttgcggttgccctcgtgtggacttgtcatcagaaagctgcgtccggccatggtttgtgtcagggcttttggttccccctgatacagcaactcgccttcattcatcagtaacacgtcacggcactgctcggcttcgtcgagatacgaggtactccagaggattaacatcccttcgcctgccagctcatgcaccatctgccacagttcgcgccgtgagatagggtcaacgccgacgccgggttcatcgagcagcaacactttcggttcgcccaccagggtacaggccaggccgagtttttgtttcatcccaccggagagcttgcccgccaggcgtccggtaaacggcccaagagacgtaaactccagcaggcgagcaaaagtttgcttacgtgcctcgccggtgacgctgcgcaaatccgcgtacagattgaggttctccatcaccgtgagatcttcatacagaccaaatttctgcggcatatagccgagcacggcgtgcagcgcgccgtcgtttttgattggatcaaagccaatcaccgtggcattgccgctgtcgggtttcagtaatcccgccagcatccgcattagcgtggttttacctgcaccatccggccccaccagccccgtcacataaccggcgtgaatggtacaatcgagcggcgcgacggcgggcttgtccatgcccggaaagcgtttttccaggccgttcagcgtgataacggcatcattcatgtcctgcctcgttaccgaattgcaccgtcaccggcattccctggcgtaacgcatcatcggcgtcggtcaccacaatacgcaggcgatagacgaggtcggtacgcagatccggtgtttcgacggttttcggggtaaattcagcagtcggcgaaacgaaaccaatctgcccgtgatacggcttgtccgggcgaccatcggtataaagcagcactttgcgccccggctgggcctggtcaagataccgttcatcaacataagcgcgcacccacaccggacgcgttagtgaaacggtaaacaccgtgccaccttcattgaggaccgtgcctggctccaccgcgcgcgttaacagcgtgccatcagacggggctatcaacgttgagtcctgtaaattcaactccgcctgcgccagttgcgcctgcgcctgttcgaggctggctttcgcctgggcgatgtcctgttcacggttaccggaacggtactgacgcaatttatcctgtgctgatttcagcgttgcctgcgcctggtcgcgcgaggagcgggcattttccaggtcatttgccgaaatagtgcggcttttccacagtccttgctggcggttatagaagttctgcgcatagtcataggcggcttgcgcctgtttcaccgctgcggcggcctgagcgatttcttcatcgcgatacccggcaagcatcagatcatactgcgcctgtgccaccgagacgcccgctttcgcctgcatcagggcaatctcatacggcttgtgatccagttcgcccagcacctggcccgctttgatagcatcaccttcgtccaccgccagcgattcaacgcgccccccaacacggaaactaagattcaccgtacgaatatccacgttgccatacagcgtcaggccgttatcctggcggctttgataccaccagtagcctccggcaaccacggcggcaagtaccactaccgccagttcgatcacgacaggttttttcatcactacaaactcctttgcgataatccttgcaaaatcaggtcgatatgacaggtcaccgtctggttgatcagttcggtcttttcttcatcgaacgcggtccagccggtacgtaacagaattgtttctttgccaagacggaacgccagaatctcaccaatcaacgcatgggtatgaaggatcatgcgggtgtcattggcgtcgctgccggtccaggcggcaatcaggcgtgtcaggtggctgtgtagcggactaatcacctgttcgtgcaccaggtggtaggctgccgtgggagagagctgctcacgggagataaacttgctgaggttgacggtgtcatcctgggtgagcagcttaatcatgttcctgcaggcgcgaaggagcagttcacggatggcagcccgatcaggctgtggttgggcgaacaagcgttcggcttcctcggcatgcggacggaactgctcgccaataaaatcggcaatccactgggcgcaggcgaggtacaaatcttctttcgaaccgaagtagtaggtgatggcagcgatattctgcccggcttgggcggctatctcgcgggtggtggcgttcattccatattcaccaaactgcgccagtgcggcagcaatcagctgttttttcgcctgttcacccttgattgtcatggcaggattattcatcgcacagtccattcttaatcaaatgattgattaagattatgactccatatgggagttgtccagtatggctaagaattttagctacgccagtcacagggataatttatgcgctgcgtcacaaaaactgctacactccgctcgctcatgacattgtggtttttgtcattttccttttcagtatctccctgaaaactacaccggtaacggtcggggcggttcggagtagtcatgtctttcgattatttgggtttaagccctgatatcctgcgcgccgttgccgagcagggttaccgtgaacccacccctattcagcagcaggcgatccctgcggtgctggaaggccgcgacctgatggctagcgcccagaccggcaccggcaaaacagcgggctttacgctgccgctgttgcaacacctgatcactcgccagccgcacgccaaagggcgtcgtccggtacgtgcgctcattcttaccccgacccgtgaactggcggcgcagattggcgaaaacgtccgtgattacagcaaatacctgaacattcgttcgctggtggtgtttggtggtgtgagtattaacccgcagatgatgaaactgcgtggcggcgttgatgtgctggtggcaacgccgggacgtttgctggacctggaacatcagaatgcagtgaagctggatcaggttgaaatcctcgtcctcgatgaagctgaccgcatgctcgacatgggctttatccacgatatccgtcgcgtgttaacaaaactacctgcgaagcgccagaacctgttattctccgcgaccttctctgacgatattaaagccctggcggaaaaactgttgcacaacccgctggaaatcgaagtggcacgccgcaataccgcgtctgatcaggtgacccagcacgttcactttgtcgataagaaacgcaaacgcgaattgctgtcgcacatgattgggaaagggaactggcagcaggtgctggtgtttacccgtaccaaacacggcgctaaccatctggctgaacagctcaataaagatggcatccgtagtgcggcgatccacggcaataaatcgcaaggtgcgcgtactcgtgcgctggctgattttaaatcgggcgatattcgtgtactggtggcaactgacatcgctgcgcgcggcctggatattgaagagctgccgcacgtcgtcaactatgaactgccaaacgtaccggaagattatgtccatcgtatcgggcgtaccggtcgtgcggctgctaccggtgaagcgttgtcgctggtgtgtgttgatgaacacaaactgctgcgtgatatcgaaaaactgctgaaaaaagagatcccgcgcattgcgattccgggctatgagccggacccgtcaatcaaagccgaaccgatccagaacggtcgccagcaacgtggcggcggcggtcgtgggcaaggtggtggtcgcggtcaacagcaaccacgccgtggggaaggtggcgcaaaatctgcaagcgcgaaacctgcagaaaaaccgtctcgccgcctcggcgatgccaaaccggcaggcgaacaacaacgtcgccgccgtccgcgtaaacctgccgctgcgcagtaatcttttatgccgggctatgcccggcatcaggctgatgaacaaacgcaaaactgcctgatgcgctacgcttatcaggcctacgtgaactctgcaatatattgaatttgcatgcttttgtaggccggataaggcgtttacgccgcatccggcatttcacaacaagcacttgtcagcaatttgagaacacgggaaaaaatttatctgttttaccgcccataagccaccgagacgttacttctctatagccaattgttctcgcaactccattaaaaggtagcccagtcgattcttgcccttaccattaccaccgtctccccagtaagcatcgttttccgtatgctcaaccagttttgcgggcgcggttgccagcaagagcacacgcagttctgcatgctgttcgaatttagcacgaagtgctttacgcatcacctgttctttaaccgactcccagtttttacgaagtggcttggaacgattacgccccatgcgagcggcgaccatgggggaagaaacccgacggatctcttcgcggtatttttcatcaaggaatttttgtgcctgaaaatagtgttcggaggtgggccaggttttcccgtcaaccttgatgggccaggcggcaaagttagaaaaatcaccgtagtcatcgctggtgctgtagaaatttatgatggtgtcttgcatgacgtgttggatcctttgtgctcgaacgggcattaaaccgcattatgttggtggttattgcgagccgctttccagaaacagaaaaaccattacccctgaaaaccgaaaaatgccacaatattggctgtttatacagtatttcaggttttctcatggcattaaccgccgcgcttaaagcgcaaattgccgcctggtataaggcgcttcaggaacagatccccgactttattccccgtgtgccgcagcggcagatgattgcggacgtcgccaaaacgctggccggagaagaagggcggcatctggcgattgaagcccccaccggcgttgggaaaacgctctcctatttgatccccggcatcgccattgcccgcgaagagcaaaaaacgctggtggtgagtaccgccaacgtggcgttgcaggatcagatttacagcaaagatttaccgctgctgaaaaagatcattcccgatcttaaattcactgccgctttcgggcgtgggcgctacgtttgtccgcgtaatctgacggcgctcgccagcactgaacccacgcaacaggatctgctggcgtttcttgacgacgaactgacggcaaataatcaggaagagcaaaaacgttgtgcgaagctgaagggcgatctcgacacttatagatgggatggtctgcgcgatcatacggatatcgctatagatgatgatctctggcgtcgtttgagtaccgacaaagccagctgcctcaaccgtaactgttactactatcgtgaatgcccgttttttgttgctcgtcgggagattcaggaagcggaagtggtggtggcaaaccatgcgctggtgatggcggcgatggaaagcgaagccgtactgcctgacccgaaaaatctgctgctggtgctggacgaaggtcatcacctgccagatgtggcccgggatgcgctggagatgagcgctgaaatcaccgcgccctggtatcgactacagctggacttgttcacgaaactggtcgctacctgcatggagcagtttcgcccgaagaccatcccaccgctggcgatccctgaacgtttgaatgcgcattgtgaagagttgtatgagcttatcgcctcgttaaacaacattctcaatctctacatgcctgccgggcaggaggcagagcaccgttttgcgatgggcgaactgcctgatgaagtgctggagatctgccagcggctggcaaaactcaccgagatgctgcgtggtctggcggagttatttcttaacgatttaagtgagaaaaccggcagccatgacattgtacgcctgcatcggttgattttgcagatgaaccgcgcgttggggatgttcgaggcgcaaagcaaactctggcggctggcgtctctggcgcaatcttccggtgcgccggtgaccaaatgggcgacgcgggaagagcgcgaagggcaactgcatctctggtttcactgcgtggggatacgtgtcagcgatcagctggaaaggctgctgtggcgcagtattccgcacattattgtcacctccgcaaccttgcgttcgctgaatagtttttcgcgtttgcaggagatgagtggtctgaaagagaaagcgggcgaccgttttgtggcgctggattccccctttaaccactgcgaacagggcaaaattgttattccccggatgcgcgttgagccttccatcgacaacgaagagcagcatattgccgaaatggcggcctttttccgtaagcaggtggagagcaaaaaacatctcggtatgttggtactgtttgccagcggacgggcgatgcagcgctttctcgactatgtgacggatttacgtctgatgttgctggttcagggcgatcagccgcgttaccgtttagttgaactgcaccgcaaacgcgtcgccaacggtgagcgcagcgtgctggtgggcttacagtcatttgccgaagggcttgatttgaaaggtgatctgctcagccaggtgcatatccacaaaatcgcttttccgcccatcgacagccccgtggtgatcaccgaaggggaatggctgaaaagcctcaaccgctatccgtttgaggtgcaaagcctgccgagcgcctcgtttaacctgattcagcaggttgggcgactgattcgaagccacggttgctggggcgaagtggttatctacgacaaacgcttgctgaccaaaaattatggcaagcgactactggatgcattaccggtatttccgatagagcaaccggaagtccctgaaggtatagttaaaaagaaagaaaaaacgaaatccccacgccgtcggcggcgttaatgatgtgagtcaggtaaggagtcgtaaatggactatcgcaaaatcattaaagagatcgggcgcgggaaaaaccacgcgcgcgatttagaccgggatactgcgcgcggtctgtatgctcatatgctcaatggtgaagtccctgaccttgagttgggcggcgtattgattgcgctgcgtatcaaaggagaaggggaagcagagatgctcggcttttacgaagccatgcaaaatcacaccatcaagctgacgccgccagcaggcaagccgatgccgattgtcatccccagttacaacggcgcgcgtaaacaggccaacctgacgccgttgttggcgattctcctgcacaaactcggttttcctgtggtggttcacggggttagcgaagatccaacccgcgtgctgactgaaaccatttttgaattgatgggtattacgccaacgttgcacggcgggcaggcgcaggcgaagctcgacgaacatcaaccggtgtttatgccagtcggcgcgttttgcccgccgctggaaaaacaactggcgatgcgctggcggatgggcgtgcgtaacagtgcacataccctggcgaaactggcgacgccatttgccgaaggtgcggcgctgcgtctttccagcgtttcgcatccggaatatattggacgcgtcgcgaagttctttagcgatatcggcgggcgggcgctactaatgcatggtactgaaggtgaagtgtatgctaatccgcagcgctgcccgcagatcaatctcattgaccgtgaagggatgcgggtgctgtatgaaaaacaggacactgctggtagcgagttactgccacaagcaaaagatccggaaaccacggcgcagtggattgagcgttgccttgctggcagcgaaccgattcccgaatcgctgaaaatccagatggtttgctgcctggtggctatgggtgaagcggcaactatcagcgacggcctggcgcgcgttaatcaggcattttaattcttttctcagccggatgagccatgtcatccggcttttaccccaccgcaatatgaaattcctgcatctttattgaccttcccacgcccggcgtgcagcataaaaatacaacaaacacataacataaacaggagttaaccatggaaagtggtcatcgctttgatgctcagacgctgcacagttttattcaggctgtatttcgtcagatgggtagcgaggaacaagaagcgaaattagttgccgatcatttaatcgcggcaaacctggcagggcatgattcacatggtattggcatgatcccaagctatgtacgctcctggagtcaggggcacctgcaaattaaccatcatgccaaaaccgttaaagaggcgggggcggcggtcacgctcgatggcgatcgcgcatttggtcaggtcgcggcacatgaagcgatggcgctggggattgagaaagcgcatcagcacggtattgccgccgtggcgctacataactcgcatcatatcggccgtatcggttactgggcggagcagtgtgcagcggcggggtttgtctctatccactttgttagcgtggtcggtattccaatggtcgcgccgttccacggtcgcgacagccgctttggcaccaatccgttctgtgtggttttccctcgtaaagataatttcccgctgttgcttgattacgccaccagcgccattgcatttggcaaaacccgcgtcgcctggcataaaggcgtccccgtgccgccaggttgcctgattgacgttaacggcgtgccgacgaccaatccggcggtaatgcaggagtcgccgttgggttcgctgttgacctttgccgaacataaaggctacgcccttgcagcgatgtgtgaaattcttggcggggcgctttccggcggtaaaacgacgcatcaggaaacgttacaaaccagtcccgatgccattcttaactgcatgaccactatcatcatcaacccggaactcttcggcgcgccggattgtaacgcgcagaccgaagcctttgccgagtgggtgaaagcctcgccacatgatgatgataagccgattttgctaccgggcgagtgggaagtgaacacgcgtcgcgaacggcagaagcaggggattccactggatgcgggaagctggcaggccatttgtgatgcagcgcggcagattggtatgccggaagagacgttgcaggctttctgtcagcagttagccagctaaaaaaaagcccgtccagtggcggacgggcaaacaagggtaacataggatcaatgagggttagagcatatgcgtctgtcggcaaacagacagggaaatacttgtgctggacgtagcgtaaacgcctgatccgtccaacggttcggattttgtaggcctgataagacgcggtagcgtcgcatcaggcatctgttgccggatgcggcgtaaacgccttatccgtcctacgaattacttataaattaccgcagtaccgcttaatttattgttgttggtggcggaagtgatgctgtatccactggcaccggctgccgcggctttctcagccagtttcgcttccagggcatcgagggtggatgcgccatcggcagaaaccacgccgattttattcatgttctgtgcctgggatgccgttatcggttccgccgcgaacacgccaaatgacagagttgaaagagccatagcagcaacaacagtattgatagttttcataattaatctctcgcaggtgatttttgtataagtgacgttgtttcgtcgatgtgatgagtatcacgtttttttacgagagataaaatcgaagagaattgaccgccttgttcaaataaattgattgatatctaacatactgataaaccatttatttgttgtacttatgaacttgttttataccgcgtggcagtcacagcagcgttaaaggcacggaatgccacgcaaaataaaaattatactcgctatgcatctcgccagttgtagttaacgtaactggctgtctttcgaacctctgcgattatatcctgtataagctggtttttgtaaatctttctcctgctgacaatgaatacataagcgcacgccaggaatggcttcccgacgggcctgcgggatgggggcaccgcactcttcacattcatccaggctttcgccgcgcggaatttcaccccgagcgcgggcaatcgcatcttcaattgtactgttgatctgttcgttgacggcgtcatcgttagcccaaccggatgccatatcgacctccccatatcaatacttgtacagttaagtgtagctaatccagggacgaactcgggcagttcaagcatcagatctccgaccattcccgcagcagattatgataaagattaagcagcgacaggatctcttcactttcgccgtagcggcttttcagcgactgaatattgttgtccagttcaaacagcatggcgcgctttttatcatcgcggatcatcgactggatccacataaatgatgccactcgtacgccgcgggttacgggtggcacgcaatgctggctgctggagggatacaacacgagatcgcctgccgggagttttacccgatgttgtccgaaggtgtcattaacgaccagttcgccgccgtcgtagctttgtggatcgcttaaaaacagcgtggcagaaaggtcagtacgcatccagccgttttgtggatggctgcgtactgcgccatccacatggaaaccataggtttcattgttctgatagcgattaaacagcggcgtggaaagggtacgcggcaaggccgcggcaaagaacaaagcatgttggttaaccgcgttcagcacctcattttgcagggcggcgtataacgtgctgcgggtgtcgacctgttgattgttcttaacttgcgcaccttgtgcgccggtggtgacgcgtccatccacccattcggcttgttccagttgttcgcgaaaccgggcgacgtcctgtggcgataacacgccgggaatgtggtacatcatacaagttctccaaaaagtggggcctgcgccccacatctgaatcagaaatgcatattggctgtgagcaagaaggttcttggctcgcccgggtgataacggtagccgctcttgttgattgaggcgacgtaatcagtatcaaacaggttgtagacgtttagctggaagtcgagattgcgattaacccgataccccagtttggcatcggcgacccagtaaccttcggtaaatgctggcgttcccaccgcgccgtctgaacctttatgcatactgccgatatagcgtgcgcccgcgccaacagagatatcgtcggttgcctgatattggctccataaggtgaaggcgtgctccggggtatacggcagcgatgaggaaccatcctgggcaacatctttgccgtttttgatggttgctttttgctgggtatagccgccaatcacctgccacgcgggagtgatattcccggccacggatatctcatagccttcgacgcgtttcttaccgtattgcgagtaagttccgtcatcattttgctcaacttcattttcgatatcagtacggaacagcgcggcggtgagcaacagacgtttatccagaacctgccatttggtgccaatctcgctggtgttggctttttgcggtttaaaatcggtgcggttggcactgttaccgctgccagactgcgcaagggcgaagttgttgccgcccggaggctgctgggaaacggcatagttaatatagacattgccgttttccgtcaggtgatacagcgccccggctttccagttcatcagattgcccgacttggcggtgtcgacggtggtgaccggagaaccttttgccacaccagttgggcaggtgatggcaccgcgtccgctgccgccgcaggcggtggcactgtcatattcagtatgataattatccagacggatcccgccgttcagctcaaaatcacgggtgatttgcagcgtatcaaaggcgtaaattgcgaaggtatccgtctgaccattggcgtttgcgccgttgcgcgtcaggccgccgggatgaatgctgctgtcaggatgataaatatttaccgcgggtaacgtcaccggattaacgccgtagttagtctgcgtttcacgggtaaattccacgccggtactgacatcatgaccgatagaaccggtatagaacgtcgaggtcaggttggtctggttggtgagaattttattactcacatctttggtattcgccgtgcgtgaccaggttcagctattcacatcgctggtgggctgagtaatattcgacgccccgcccataatcgccgtcatcaggtaatcctgctttacgcgcgaccaacgggtagtattgcgaatggtggtgttatcgttgatgtcgtgctcaaaacgcatggtggcggtgtcggtggtcgaatcgtcgtaatcggaatccgtgccgtaaaagttatgagtatcaacttttccggaatgattcagggccgccgttcccgcagatggggcagaatagcccggcaaaccgatggtcggaatgccgccgtctggcgtgttgtgctgggtgacatgcagataattaagatacaaacgattcgctgtaccaaggccaaaagcgacagaaggggcgacgccgtaacgctcatttttgactttgtcgcgtccggcatcgtgcgttttttcgcccattacattcaggcgcaccgcggtggtatcaccaatgacctgattgacgtccagcgtgccgcggcggaaccaggcgctgccaatactggcggaggcgtcaatgccggaatcattgcgcggctgtttgctgatcatattgatcgagcccgtcggtgcgctgcgcccgtagtcggtgccggacggccctttaatcacttcgacctgctcggtattgaaggtgtcgcgcgagacgctgccgatatcgcgaatgccatcaatataaatactgttagaggtatcggcaccacgcatataaatggcgtcgccagtggtggagttaccgttctcacccgcaaaaaacgcacccacgccggggtaatgccagtcagttaagcaactgactggctctttttcggggctgtggggtatttccagggcctctcctttaccactctcgggaaggccctttcccttctcgtcggtaatttcacaagttgtcccatacttgcaagatcgcgcatcagctccggtatacgtcccggtgaagcgccctgcaatgtcatcagcattctcatcaccattccgcatgattctgagaaactcagttgattcggccagtaacctttcagatgttccgccattttaatcatctgatatctcaccagattataagccagtaagacaccccacagctcttgctccacaagctccggctttttacttctcagcgtcagcctgctcagttgcatcgtctgttttatctccctgtatcccagttcgatttcccagcgatgactgtacagatccgccatttctcctccggggaagcgcatggcgtccgtcatcgacgtcagcagatggcagacttttcctttgcgcgtcacggtcagcaggcgggctgtcacttcatttcccagtcccggccacttttttcgtgcctgcgggctggttttcagcttcaccagatgatcgcctttacccagttttctgagctcttcatattgcgctccctttctgagaggtatcatccagtggcggtgttctcccgccaggctccaggcatttaacagtcccagtgagtaataacctttatccattaacgtcagagtgttatcgccggtttgttctataagttgctcagcaagctcattttcgctgttcttcatcgtgccgaaggctgcagccgtcagcagatggctggtcagttccatctggcagaccattttgacctgcgggtagagcgccgggttcccggcatgtgtctggcgggggaaggctgcatcgttctctggtgtatccggtgtgcgccagaacacaccatcgatggccagcagggtcaggccgcaccagtgcggatgcggcgtggcgttatgccagagctgcgctgttttcgtgaacacgcggcggacagcctcacttcccaggcgctggcgggcctgaataacggcactgggggcaacgaaggggcgattgcccggcagcatgatgtccaggcgattcacaatctggtgaagaggttctttacgctcaagcgccatgccaacaatacaccagaccatcatttcgaggggaagacggcgcttgcgtagcgttacagtacctgattcggcaaggcaacgagagatgagttcggggtcgaggtaatcccccagagaagtcagtgggttacgcagagaatcgtaacgggataccagatcaagagcctgtccaatgtgcataaaaaaatccggaaacaagtgagcgtttccggattcttacacagccactggatcggtcaactgatccttaactgatcggcattacccacgccgggggcgtttttgagcgcgtcggtaaggttggttgcgccctgatctttaatcacttgttcagaaatcaccgtcatcgtgcgggtagtatccgctaccggacgcgagaatttcggatcggcagattgttgtggcgcataaagcgaaggcgttgatgcttcgacaaccagcgtgtcatccgcgttagtttgcccttcggcggcgagtgcctgagccacaggcgtgatgccaatacaaagaccggcaaagaacgtgagcgaatgaaattgtctggcagggaaattgcgattgttttccattttgcaggtgactttttcttatatgttgaaattttcactgccacgagaaagcatctctgcggatgcgatgccactgttaatcccgtgatagtgttcgtgcaagtgataataattttgataagcattatcacttggcgcgattttctatcacccattgcgcgaaaaagaaatacatttatttacattgagttcatatttgatgttttttgattacaaaacaggcgaaaactgcatccagaggcgaatgcagttacgttggtggggttatttgtagatggttgcagtaccgaacatctggtcatttccgcctgcggaattaatgacataacctttcgcgccttgttcgcgcgctttttctgccagtttatcctccagatcgcttaggtttgatgcgccagttgccgaaacggtaccggcgggccgtagctgaccgctgtccaggttactcatcggttgcgcggcataagccgtgagagagattccgctcaggacggtggcaatcagtagtgtgaggcactttttcataatgacatcctcataaatacaacgggtagtgcctgataagtgtaggtcgcctgcgcgatgcaaatgacgcaaaaaattgacagagatgtgcttattttttgaacgatatatttttacaaaataagacaaattaatgacatgcataatgctgatttttatgatgaattgccataaaccatagccatgttaaggttttggggaatgataaacgcagccagatatttaccctgtcgcgttatgcgggtatcttacgccgctgcttaaaggagaatgctatgtccgcccagaaaccggggttgcatccgcgcaaccgtcatcacagccgctacgatctcgccacgctttgtcaggtcaatcctgaactcaggcaattcctcacgcttacacccgccggggagcaaagcgtagactttgccaatccgctggcggtgaaggcgctcaataaggcgttgctggcccatttttacgccgtagcgaactgggatatccccgacggttttctctgcccaccagtaccgggccgggcggattatattcatcaccttgccgatttactggctgaagcaagcggaacaattccagcgaatgccagcattctggatatcggcgttggtgcgaactgtatttatccgctgattggcgtacatgaatatggctggcgttttaccggtagtgaaaccagcagccaggcgttaagcagtgcgcaggcgattatcagtgctaatccggggcttaaccgcgccattcgtctgcgtcggcaaaaagagagtggggcaatttttaacggcatcatccataaaaacgagcaatacgacgcgaccttgtgtaacccgccattccacgattccgccgctgcagcgcgggcaggtagtgagcgtaaacgccgtaacctggggctgaacaaagacgatgcactgaactttggtggtcagcaacaggagttgtggtgtgaaggtggtgaagtcgcctttatcaaaaagatgattgaagagagcaaaggcttcgcgaagcaggtgatgtggtttacctcgctggtatctcgtggtgaaaacttaccgccgttgtatcgtgctctgaccgacgtgggcgcggtgaaggtggtaaaaaaagagatggcccaggggcaaaagcagagtcgctttattgcctggacctttatgaacgacgagcagcgccgccgttttgtcaatcgccagcgttaaagcgttggctcccccggcggtaacggttcagccggggtcgcgcccggagtaggcagcacctgataagtctgcactggcgcgcgaacgcccgccaggtcgaaatgttttttcacctggctgtcgagggcaaagcgtaccgtccactgtttgagtggcagcgtggtgaacgaaacacgcagtgtaaacgcggtattgcttaagccgacaatcccggcaaaattcggttcaccaataatcagcccgcgaatttcttcgttttccattaattccgctaccgcatctttcagtgcctgattggctttatcagcatcttcatggcgatcaacatcgtagtttgccactaccgaaccaataccgcggacgaagttagcaaaggtggttatcgaagaccacggaatgatgtgatacgccccggtatcctggcgcacgcccacggagcgaatcgacatccgttccactgtgccggtcaacggcccgatagtcaccaaatctccagtgttcatgccgttttcaaactgaataaacaccccggtaatgatatctttcaccagcgtttgcgaaccaaacgagatagccagacctaatgccccggcacctgccagcaatggcgcgatattgacgccgatttccgacaacacaatcatgatggtgatggtactgataatcaccgccagcgcgttacggaacagcgtcagcagggtacgcgtacgggcgctgggtagcgggcggccatgaatatccgaagccagccggttttcgatcaaactggcgagcaccgtccagccaaccgccgagaaaaaaagaataagtgcgatacggatcaggatatctacggttttctgccccgcgccgttttgcagccagttccagaaatcgaacaatccccatgcgctcaacagcaacattaccgccacgcagacggtcagaatacgcgccgttttcagcgccgccgaaagccagccattcagccgtttttgcaactctggatagttacgctgagtatgtggcgagagagtgatggtttttgccagccagcgggaaaacataccggaaacaaacgctgcgataccaataatcgccaggctgcgcaccgttgcacccatcataaatttcaggctgttgcccggatcgaacaacgaaaagaaaaacagcacgataaaataggcgcttgccagccagtgccacaccagcgcaaaggcgcggataaacaggctgaaaaaggccagcgaatgctccgcaaagttgagcaaatgctgggtaatctcttttttattacgaaagatcaggtacaacgcccagacggtcatgcacagcataatgatgacgttcgccagcgcacctatctgtacattcacctgattagagataatcggcacggccacaatcaggccataacctatcaaactgcttaaccagctcaggcgacgactccagtaacgggcgctctcgtcctgaatcgtgaacgggcgcagctccgccacgtttgggcaaaaaatcaggcgtagtacggctttgaaaaattcaatcagggcaaaggcgttgagaaacaaactttgttggaaagcgatggtgcgactgcctgcattcaggttgtcgcttaatacctggccgacaaataatgtcagggccagtaacagcaggtcgataataaacgccccgataatcatcgccggaagctgcaaccagttgctgcgctcacgatttttttgcctcgcccactgacccattttgcgatacagcggcagtgcgcacaggcgaatcagccagtaaaaaccaaacactaataccgctaacattgaaaaatggctcagcgcattgctgaaggtttgtggattaaatggcttatgcggggagccggtgatattgcgataaagttgcccgaagcgggcggaaagggcttcaccataatggcggctgacttcggtgaccttttgcagcacggtttgctcttcaaccagcgtcggcggcacgatcttcgggaccggttccgcagggggcgtcgcggcgacagtacgcaactggtcgatcaattctttacgcgaggtgtcgttatccagcacatccgccagtgcgccataggccgcttttttttgttcgatatccggttccggggccggttcagtcgttgagtccgttgtcgttgtggttgtaacgccgggtatggataccgcgtgggcaggtgcgcccagcaggcagaagaggatgaacaggatccaccgcatgactcctccagtgagaaaacagagcaaaaagataagtatagatgctgggggaggggcgattttaaatgagaggaatctggtgtgcctccctttcgggtgaaagggaggcagagaagttaagagacgtgctgcaaaaattcctgcaagcgctggctcggcgggttcttgatcaatacctgcggatcgccatcttccgcaatccggcctttgtcgataaagatcagccgcgaagctactttctcggcaaaaccgatttcgtgggtcacgatcaccatcgtcatcccttcttcagccagatcctgcataaccttcagcacttcatggcgcagttccgggtcaagagcggaagtcggttcatcaaacagcatcattttcggcttcaccgccagcgcgcgggcaatcgccacacgctgctgttgaccaccagaaagttcggaagggtagtgatgtgcacgttctgccagaccgactttcgccagcagctcacgcgccagtttttccgcctcttctttgttcgcgccacgcacgcgtagcggaccaaacatgacgttttccagcgccgtcagatgcgggaagaggtaaaactgctggaacaccatacctgcttcctggcgaatcaggcgctcgtcaactttcggatcgttaaccttcaggccatcgacaatcagatcgccggaggtgatttcttccagtttgttgatgcagcgcagcagggtcgatttaccggaaccggacggcccgataatcaccacgacttcgccctgggcaatgttcaaatcgatattgtgaagcacctgggttgggccaaagtgcttggagacgtttttaaattcaatcacaggattttcatccttctttccagacgacgcaaaataaagcttagcaccagggtaataatcagatagaacaccgccacggcgctccagatctcaagggcgcggaagttaccggcaataatttcttgcccctgacgggtcagttccgccacgccgatcacaataaacagcgaggtgtctttaatgctgatgatccactggttacccagcggcggcagcatacgacgcagtgccagcggtaaaatgacgtagcgaatggtttcccaacgtgaaagaccgagcgccagtcctgcttcacgaaaacctttgtgaatagacagcaccgtaccacgcgtgatttccgcaatgtacgcgccggagttgatcatgatggtgaccaccgccgcagtaaatgggtcgatgcgtaagtcgttaaacgccatcggcagggcgaaataaataaacatcacctggacgacgataggtgtgccgcggatcacctcaataaagaccagcgcgacgtggttggctatccaaccaccgaaggtgcgtgcaaaacctgccagcaatccgattaccagaccgccagccagaccgaggaccgaaatccacagggtcattttggcaccttcaatcagaagcggaatggcaggccagatggcactccagtcaaactgcatatgttgttcctgttaccgtggtgtaaataatcaaattcagggtaattaatggccccggagcgggtttgcgcccctcaccctaatcctctccccagaggggagagggaactgccagtgcgctttacaggtgtagcgttattatttcggttcagtaccgaaccattttttgtagatttcgttgtaagttccgttctcgcgcagggttttcaacgcgccgttgactttgtcacgcagctcgtcgctacctttcgggaacgcaataccgtattgctgcgcttccagagagtcacctaccgctttgaactgaccgttaccggcggttttgatgaagtacagaatgtttggcgtatcgtgcagaacggcgtctgcgcggttggtgcccagttccatataggcgttatcgatgttcgggaactgacgcagatctttagttttgatgtttgctttcgcgtaatcaacggagccagtaccgctcttaacagcaaccactttcccgtcgagatctttcacgcttttcacatcgttattgttagctttcaccatcactaacaggccgcttttgtagtagccgtcagagaaatcgatcgcttttttacgctcgtcggtgatggtaatgcccgccagcgccagatcgacgtttttggtttgcagtgccggaatgatcccactgaaatccatcggcttcagttcgtaatccagcttcagctctttagcgatggcagcccacagatcaacgtcaaagcccacatatttatcgccctgtttaaattcaaacggaacgaaggcggtatccgtcgcgacaactaattttttatccgcggcatgagaagaaaccgcaaaagccagggtcagtgcagccagtgaaacttttaatacagacttcatagcatttccttttttctatccacgggacgatcccctgcgtgacattcacatatatgaaaaaatcgtgccagttttgcaactccttgatttttcgagatgcggcaaaaacgtgatgcacgatttatagggcaataccctgaagatgcaccattctggggcaccaatctggtgcgctaaaattgtgcactcaacacagtgattatttagcgtaaaacctgatgaaaaaacaatctttatgtaacgattgtgtgatgatgtggatacaaaaaatttacttaatcagctggagatagcagatggatgcactaaataagtgcgttgaggtgggctgcaaaacaaaacggcctcctgtcaggaagccgcttttatcgggtactaaagttctgcaccatcagcgatggatttattcgatgttagactcgataaaccacaggaatttatccaggtcgcgagacgcggcggtcaggatatctgcggtgtcgtcatctttcgcttcgccaatcgctttgcgtacgtcattagcgacgattgcgtaacggtcagccagttctttcaggtgatcctgaacgttgtggatgtccagcgggtaacttttcagcggggttttgctgttgataacttgagtggtccccagagctacaccgcccagctgcactgcacgttctgccatggtatccagatgatcgatcagtgcggtgcggaagccatccagcatttcatgtacggcaatgaagttagcgccgcgcatgttccagtgcgcttgtttggtaatcaaagaaagatcaataaactggataacctggcgattcagcaactctactgttgcttttttctcgctgtcggagacatcgttgcgggtataaagcagattggtcgcttttgatttaactaatttagcggtactcataatttcatatcctcttgatgttatgtcccagtaattaacgagactaagtatagcaccggctatgtgttccgctattctggctgttcctatcacactaatagtggtaacaagcgtgaaaaacaaaactaataaagattcaatgagttagatatattgataagaacaattcttatttatctgctcgccaggaattttcggaataaatatgcttttgcataattcgatatataaagacggtgtagaggaaaagtagcgagaaattctgcatggttatgcataaccatgcagaaatgtaaatttaattaatgtctaattcttttattttgctctctttgcgtactgtcagcgtagaccccattgaagcggcgatgatagcgccgagcgccagcagctgtatgggtgtcagtgtttctccgaggaaaatcatcccggaaacggcagccagcgccggttccatgctcatcagcgtaccaaatgtccgtgttggcaaacgggtgagggcaatcatttccagcgaataaggcagagcggtcgagagaatagcgacagccagacccaatggaataaccgaccagtgccagagtgcttcaccagcctgaagcgctccaattggcacgaaaattaacgctgcaatcaacgaaccaattgccaccgtcgcagggccatgttccgctcctgcgcgttgcccacttaaaatgtaaatagcccaacaagccccggcccccagtgccagcgcacagccggttaaatcgacatgggaaacgtcttgccccagcggtagcaggaaccacagaccaagaaccgccagcacaacccagacgaaatctaccgggcgacgagaagagaacagcgccaccgccagtggtccggtgaactccagcgccaccgcaatacccagcggtactgtctgaatagaaagataaaaaagataattcatcccacccagcgaaacgccgtaaaacaacagcggtaaccgttgctctttggcaaagcgcagtcgccatggcttaaagaacgcgatgaggatcagcgttcctaatgccagacgcagcgcagtgacacccggtgcgcccaccagaggaaaaagtgacttagctaacgaggctccaccctgaatagacgccatggcaacgagcaatatgactattggtaaccagaccggcattttacgtaatgaaccaggcatcctttctcccacaaatatctagacttaagtaaagcgtggagtgtactggatatacccaatgctggttgagcatttgttgaaaaaattttcccccgttttgactaaaatgcgccaggattgatggaatcattagtctggtgattaggaataatctggatgaatgacagggaaaacatgcgtaatacttacgcagttctctgaaaaagtgatttaaatttagatggatagcggtgtatggaaacgttctgttacatgaaatggcccgttagacatcacaaatcgcgaagagtttcccattaatttttgatatatttaaaacttaggacttatttgaatcacatttgaggtggttatgaaaaaaattgcatgtctttcagcactggccgcagttctggctttcaccgcaggtacttccgtagctgcgacttctaccgtaactggcggttacgcacagagcgacgctcagggccaaatgaacaaaatgggcggtttcaacctgaaataccgctatgaagaagacaacagcccgctgggtgtgatcggttctttcacttacaccgagaaaagccgtactgcaagctctggtgactacaacaaaaaccagtactacggcatcactgctggtccggcttaccgcattaacgactgggcaagcatctacggtgtagtgggggtgggttatggtaaattccagaccactgaatacccgacctacaaacacgacaccagcgactacggtttctcctacggtgctggtctgcagttcaacccgatggaaaacgttgctctggacttctcttacgagcagagccgtattcgtagcgttgacgtaggcacctggattgccggtgttggttaccgcttctaatcactttggtgatataaaaaatccgcctctcggggcggattttttgttttaaggtttcgggtcgaaaatatcggttccgagatggttgtaatccaccttctgtaactggaagttggtgatgtatatcggcccggctttcttctcagatataaacgggtatttgatatttatttccttcgctttaattcccgtccactgcgagaaaaagcctaagaagtcattggctgagcggcgggctttaatcacccgatgcgctttatcgtcgctggaaatgaccataaaaggcacctggaaattttgctgatatttatcatcatgggcaaggtattgcacgtctttgccgcgctctttaaaggccagaccgtggtcagaaaagtaaaccagagagaagctgctgccgctgttgcgtaactgatcgtacagcttgcgcagtaaatcgtccgtttgcgtcatggtatagagatagcacgacgtttctttcgattgcacaaaggtttcgtatttgccttgtgtcctgtcgcaggcctgcggatgcgagcccatcagatgcagaacaatcagctgcggttgcgagtgctcttgcgccagcacttgagcggtcatatccagtaacgcttcgtctttcgtgtttttatctgcttcaaaattaccttctttcaggaagtacacttcatctgcacgtttggcgatgctggcgatagcagtatcgtattcgccgatttggccctggttggaaaaccaccaggtctggaagcccgcgcgatttgccagggtgacaaagttatcctgaaactgtggtttgccatcgactacgcgattgagcgttaagccaagtgatttctgcgtggagccactggcggcaatgtagtcagcaaatatcaaaccgttaacgctgctggcaaacggggtattgtcccagtgaccgccaaaggcaccgagggcatcgcgacgcgcgctttcgccgatcaccaccacataggtctgatacttcggcttaacggcagtgaccgtccaggtatctttcattccggaaagttttgccatccgttcttgctcttcaatcacctcgttattattgacgatgacatccttagcaaaacgaaataccggatagccagtatctttcagtttaaatacgccaccccaggccaggttttgcacgggagcaacaaaaaatgtcgccacactgaataccagacacaggctgtcgaaggtattccagcgcgctttttcattctctttttttcgcctgattgctattacgccgagcgcaaaaataaataagccgaccaggtagctgtaccacggaaaaatcgtcaggatttcggtcgactcttccatattggtggagtgcaatgccagcaatgtattgaaattaggcgcgccgtaggcctgagcaaaagggaaataacaagccgccaccagcgaactgacaccgaccagaactttttgtacgcgaggcaatgttcgccatagcaaaagcaaaatagccgtaaacgcagcggtgtagagcaaactgaaggggtaacctaagccgaggttaattaatagcgactgtaaaaagtagaacgcagtccacgggctaaatacccggctacgggtaacaagcgattctttgagggttaaattcatatgccactatcgtaacaaacgccatgtgcttaccctggcgtcaagggtcaatacctgcaagagtgcgtgaagaggggaaaggggtccgcatccgcgagccgcaatatacgcagggctgcaagaagatagagcgagccgccgttcaggtcaactactgacgaacaaatcttttgcgaaggggattgcaaatccgacaaaaagtggggtttttcagaccaaaacgcgttatgcctgcataaaagcaggagtgaagcggcgtaccgcgacgccgctatttatcggaaggtttatcttgctgcggtttgttgttgaccatatcgcacaacatagagagcagcattaaccgtactttaaagggagaatgactaaacacgcgcatacacttcttgaactcattcataagacctcctgacttgctaatcccgtcgatccttgagggatgattgcattacatacagatatagcacaggctatattatgtagctattgctaaaacgttaattttttgtaccttcgcaactctggtttacaatgtgcgcacgaaatgagaacgctatgtatgcgtcaccataatgaggaagcacaatgagtcgtcgcgcaggtacgccaacagcaaaaaaagtgacgcagttagtgaacgtggaagagcacgttgaagggttccgccaggtcagagaggcgcatcggcgcgagcttattgatgattacgttgagctgatttctgacttgatcagggaagtgggggaagctcgtcaggtggacatggctgctcgtctgggagtttcgcaaccgacggtggctaaaatgcttaagcggctggcaaccatggggctgattgaaatgatcccctggcgtggcgtgtttttaacggcagaaggagagaagctggcgcaggaaagccgcgagcgacatcagatagtcgaaaatttcttgttggtgttgggcgtcagtccggaaatcgcccgtcgcgacgcggaaggcatggagcaccatgttagtgaagagacgctcgacgcttttcgtttgtttacccagaaacacggtgccaaatgagcctgccttttttacgcacgctgcaaggcgatcgtttttttcagttattaattcttgttggtatcggattaagctttttcgtgccctttgcaccgaaatcctggcctgctgctatcgactggcacaccatcatcaccttaagcggcctgatgctgctgaccaaaggtgtggagttaagcggttattttgatgtgctggggcgcaaaatggtgcgccgctttgctacggagcgtcggctggcgatgtttatggtgctggcggcggcgctgctttctacctttctgaccaacgatgtcgcgctgtttattgttgttccgctgactatcacgctaaaaagactgtgtgagatcccggttaatcggctgattatttttgaggcgctggcagtcaacgctggttcgctactgacgccaattggcaacccgcaaaatattcttatctggggacgttctggtctttcgtttgccggatttattgcccaaatggcaccgctggctggcgcaatgatgctgacgctcctgctcctgtgctggtgttgtttccctggaaaggcgctgcaataccatacgggggtgcaaacaccggagtggaaaccgcggctggtgtggagttgtctggggctgtatatcgtctttctgacggcgctggagttcaaacaagagctgtggggactggtgattgtggcggcaggctttgcgctgctggcacgtcgcgtggtgctcagtgtggactggacgctgctgctggtgtttatggcgatgtttatcgacgtccatttactgacccagcttccagcgttgcaaggcgtgttgggtaacgtgagtcatctatctgaacccgggttatggttaacggcaatcggtttatcgcaggtgatcagtaacgtgccgagtaccatattgttgctgaactatgtgccgccgtctttattactggtatgggcggtaaacgtaggtggctttgggttattacccggatcgctggcaaatttgattgcgctacgtatggcgaacgatcgccgcatctggtggcgtttccatctctattcaataccgatgctgttgtgggcggcgttggtgggatatgttttgttagttatactcccggccaactagggtctggcaaataaaaaaggcggattatgagtccgccttttgctttaagttttgaagattaattcagacgaaccggcatcccggagcggtttttaatcgcttcatcaagaacaacctggtcaacatctggctgaccggtcactgtttgcacgctcttcgtcagggtaattggcacaatttcctgaccttcaaactgggcttcggtggtagacagcgggttatggacttcaatataacggctgccgtctggctcggtggtcgcttttaccggctcatcaataaactgtacgcgggtaccgaccggtactttctcgaacaggaatttgatgtcttcgttacgcagacgcacacaaccatgacttacacgcaggccgataccgaagttggcgttggtgccatggatagcgtacaggcgaccgatgtagagtgcatacagccccatcgggttatccggacctgccggaacgacagccggaagcggttcgcccgcagcgcggtactctgcgtgcattttggcggtcggcgtccaggtcgggcctgctttcttacgctcaactttggtggtccagttgataggcgtatctttgcctaactgaccaatgccgatcggcagcacgataacggtgttggtccctttcggatagtaatacagacgcatctctgcactgttaatgacgatgccttcatgaacggtatccggcaggatcagctgctgcggaatgttcagtacagtaccgcctttcggcaggaaggtatccacacccgggttcgcttccatcatattggaaagccccatctggtactccgcggcaaaatactccagcggctgagtgttaccttcaggaatggtgatcacctgattctgaccaaccaggcgactcccgtcggttggcagaggataagttaccgcagaggcggtactgcaaaagccgacaacagcgaaggccgctgcgaataatgttttcaatttcatattcatgttaagcgagattttgtgcctggcaggccattgggttgagaatattagagtattggaagcgcattataagttcattccagctcacagtgaaatcagatgtgtacgaaatcacattttttgcctttggcttgagtgtagaccttaagcgaggagcaggatcttctttcagacttatggcataatgcgcggtttgtcatatctcttttcaggatacgcctgtgttagtttccagtaacgtcaccatgcagttcggcagtaagccgttgtttgaaaacatttccgtcaaattcggcggcggcaaccgttacggcctgattggcgcgaacggtagtggtaaatccacctttatgaagatcctcggcggcgacttagagccgactttgggtaacgtttccctcgatcccaacgagcgcattggtaagctgcgtcaggatcagtttgcctttgaagagttcactgtgctggatacggtgatcatggggcataaagagttgtgggaagtgaagcaggagcgtgaccgcatctatgctttgccggaaatgagtgaggaagacggctataaagtggccgatctggaagttaaatacggcgaaatggacggttactctgcggaagctcgcgccggtgaactgttgcttggcgtgggaattccagtggaacagcactacggcccgatgagtgaagttgctcctggctggaaactgcgtgtgcttctggcgcaggcgctgtttgctgatccggatattctcctgctcgacgaaccgaccaacaacctcgacatcgacaccattcgctggctggaacaggtgctgaacgagcgtgacagcaccatgatcatcatctcgcacgaccgtcacttccttaacatggtctgtacccacatggcggatctggattacggcgagctgcgcgtttatccgggtaactacgatgagtacatgacggcggcgacccaggcgcgtgaacgtctgctggccgataacgccaagaagaaagcgcagattgctgagttgcaatctttcgttagccgctttagcgccaacgcctcgaaatctcgccaggcaacttcgcgcgcgcgccagattgataaaatcaaactggaagaggtgaaagcctccagccgtcagaacccgttcatccgttttgaacaggataagaaactgttccgtaacgcgctggaagtggaaggtctgaccaaagggtttgataacggtccactgtttaaaaatctcaacctgctgctggaggtcggtgaaaaacttgcggtactgggtaccaacggcgtcggtaaatcaacgctgctgaaaacgctggtgggcgatctgcaaccggacagcggcaccgtaaaatggtctgaaaacgcgcgcattggttactacgcccaggaccacgaatatgagtttgaaaatgatctgaccgtgttcgaatggatgagtcagtggaagcaggaaggcgatgacgagcaggcggtacgcagcattctcggtcgtttgctgttcagccaggacgacatcaaaaagccagctaaagtgctttccggtggggaaaaagggcggatgctgtttggtaagttaatgatgcagaagccgaacattctgatcatggacgaaccgaccaaccacctggatatggaatccatcgagtcactgaacatggcgctggaactgtatcagggcacgctgatctttgtttcacacgaccgtgagttcgtaagctccctggcgacccgcattctggaaatcaccccggaacgcgcgatcgactttagcggtaattacgaagattacctgcgtagtaaagggatcgacgcttaattccccgccgtctttcatgcggcagatgcattggcttcacctgttcaccccggtcacttacttatttaagctcccggggtttacaggtttgctgccttcctgcagcgtgaaatactgaggtaaaggattcgatggctggaccgggtaaggtgcagtcgcctcccggccccggtaatgatttaacgcatccattcactcccttcaacaccattgaccagcagcgtgcgtttttcttccaatggtaatgacactttcagtgcactccatgcaggacgataatccccgcgcgcgttgactttcaggttgatggtcgccccatcgcaaaccatttcccattccacccaaagcgcattaccagtttggtagccccagctttcgccatcgtcttcaaacagcaggccggacgttgtgcccacacctttcagcgggaacagtttcagttcgcgggtatcgtcttgttctgcgctcacataggtgatgcgtttgctgagcggtagaccagccccggcacgaaccatcagcggcagtttctccagcggtgcgtcgagggtgatccactgaccgccactgaaccattcgccgttgtagaaatcgtaccagccagtttcgttatctggcagccatacacggcgctggcgctcgccttgctctacgacgctggcaaccaaaatatcgcgaccaagcaggaagtcatcacactcttcaaaagtctgaacgtcgtgctcgtggtcaaggaaagtcggacgtagcattggttcatcatcggcgtatgcctgccacatcagggtataaaagtagggcagcaggcgatagcgcaactcaatagcgctgcggatcgccggagtgacgcccggatacatccacggttcgtttacggtatggtcatcgttccatgagtgaatcgtaaagcgcggatgcatcacgccgttttgtacccagcgtacaaacagttccgggtccggcttatcaccggagaaaccgccgacgtcgtgaccgaggttatacagcccggagaggctcatccccagacccatgcgggtgttgtagcgcagagtgtcccagctagtgcggttatcgccactccaggtctgcacgtagcgctgcattcccgcgcagccggagcgggagatcaagtacggacgtttttccggagcgaaacgctgctgggcttccatcgaggctcgcatcatcagcagtggcatcactgggcgaatatgtttgatcgcgatcgtctgaccaaagccgtgacagcgtgcttcaccgtcccatacttcgaattcgttgttgtcgttccaggtggagtcgatacccatctccagaagctgtgtggtcacgccttcctgccaccactggatggtctgcggattagtaaagtcgaggttagaaccttcgtcatcccagaagctggaacgttctggttcatctgtttctgaatcacggatgaacagtcctctttctgccacttcgttatagcgtgggtgatcctgcaacaggcacggcttgatattggcggccaggtgcaaaccagcattgtgaaatgcctggctcatcactttcggctgcggcactttgtcgtagttccagttgaacacatagcgtttgccgttaattgaggtataaccggaagagagctggaacgaatcgcagggaattgcatgttcttcacacaggcggataaagttcatcaactgattttgtgcgtccggcgcatcggtgtagtgcatagttgaaccgctgtagcccaggctccatttcggtccgaacagggtttttccggtcaggcgtacgaaggctttggtgatatcaagtacgcgttcgccggtaaacaggtagtagtcgatatcacccgcttccgcctgccagcggcgataggcggtgtggtagttgtcgatctcgttgcccagatccagccagcagctgctgaggttgtcataaaacaggccgaagctaatgtcatcgcggcgggtgatggtgaatggaatgtgtttgtacagcgggtcagtactaacggcgttgtagcccatcgcgtcgaggttacgcatctcgtaacgtttaccgttgcgttgcagatcgccggctttatctccgaggccataaaagcgttcatctttacgacggctctgatagtgtgccacgccatcgccgtgggcattcagcagataagcgctggtcgggcggtcattcaccaacggcagccattcgccttcgttgttacgatagtgccactccagccacagcggctggtgaacggttgcacgcagtgactcggtggcgataaccacggtgtcgtcgtgctggatcactgtccacgcgggcaggctaaagccgctgagatcttcgcggctgcgcccttcccatggcacatcctgcgccggagcaatgctccaggtgcgatctagcgccagctcgcctttgcgttttaacagcacgcggaacagattttcttccagcacgtacaggcacaggatatgctggccatcgaccagcagttcaacgtggtgggcagactgtttgtgcagggtccagtttttcagcgttttcatgtttacatccactctcaggcgcgttttgcgcgacgttcagcaataaaggtgaccaggaagaaagcgccaatcaggtcaaagaagcccatggcgataaacagggggttaaagccgattttgtcagcggtaaccccgataatcagggagaacaggaaacttgcgatccacgcggcagaaccgcgcatgccgttaacagtggccatctgacctttgtcgaaggattccaccaccagtgcgctcagcatgcaggagatgatctggtgaccgaagccgccgatggagataaggacgatggcgatatacgggttattggtaaaggccatcaccgccagcgaaaccatcaagaatgcgccactgaccgatgatgcgacaacggagttcacacgactcagcccaaacaggcgggtgtaaagtttggtcagatagccgctggcaatactgccaagatcagcggcgaggaacggcaaccaggcgaataatgcgatctgcttcaggtccatgccataggttttggacaggtatagaggcacccagaaactcatcaccgcccacgccggttctgccataaaggccgggatagcgataccgtaaaagcgtttatttttgcccacggttttcagtgcggtcagaaagggtaacttgaccgggggcgcttcgttatcctggcgaataaagtccagctcggctttgctgaggttaggatgcttatccgggctgtgatagaacgcccaccacagcaccacccacagcatcgccaggatgccagtgaacataaatgcaccctgccagccgaatgaagcgtgggcaaaatagataatcggtggggccagcatggcaccgatggaaaaaccgacgcctgcccagcctgcggcgatcgggcgttctgattttggaaaccattcaccgatggttttggcgtttgctggggttgccgcggcttccgcaccgcccataaagaagcgcaacagcgccagatgtacccagtttcccgcccccgcatgcatcagacaggccagtgcccacagtcccgcgcagatcataaagcccagtttgaggccaatgacgtcaatcagccatccgcacaacggttggaatagggtataggcgagctggaaagcacctacaatccaggaatattgttcggtggtaatccctaggctgcttttcagttcgggggcgagaatacccagcgagttacgcgtgatgtagttgacagtaacaccgagcaaaaaaaggaccagtatccaccaacgcagatttttgacgatatggcgcggtttactggcagtcatattgttattgataccctgactcatatgcactccacagaatggtatagggtttgtgcggcaacgtcagaatggagttgttacaccacttttaactttttgataaataaagtctttattgttcgtttttccattatttttgtatggaagttgttctaccaattcacagtaagagaccctaaaagcgaaagaaagcgggttttgtgcacgtttttccatgagtgactgatatacattactgaaatggatttaatgccagacagaatgggcttttttgctcatgaaaattctgtcatttccgaattagaggcagatcacaaaatggacaagaagctgaaaatcgccgatatcgccgcacgtaccgggctatcgccgagtacggtttcgcgggtgctggctggcaaagcgaataccagtgcacgcgctcgcgaacaggtgctggcctgcgcgcgtgagttgggcgtgatggatggcatggcagcaggtcgtatgttgctgaacaacctgattattttcgcgccgcaacgcgcttttgaccaacgatctgatatcttttattaccgtgtgatccagagcatcagcaaagcgttatcgccgcatgaagtgcggctgcgttactgcgcgctggaggagtttgacagcgatcccgcgctctttctctcgcggatgaatgaagcagatacgcaggcagcgatcctgctggggattgacgatccgcacatccatgatctggccgccgatctcgctaagccttgtgtgctgatcaactgccgtgatgaacgaatgcgcctcccggcgattgcgccggatcatcggttaattggcgcgttcgccgcccgctatctgtttgaaatgggtcaccgggaggtgatgaatgtgatgtgcctgcgccgctacactatggagcagcggtttgcagggattaaagaatcatggcgtcagcataatctggcctttcaccatgaccgtcatttgctgaatatcagcagttttagcgctaaagaagcggaagaaaaggtcggagcgtggctggatgccgccaatggcaagacgttgccgacggcgtttctggtcggcggggattttatggcggcgggaacggtaaatgcgctacatcgtcgtggtctgcgcgtaccacaggatgtctcggtgatgagtatcgacggctttaaccttgcggcaatcgaggatgttcccctgacggctgtgcatgtgccacgcgatgagctaggcaatgaagcggtgcaaatgttgcaacagcggctgattcgcccggatgctccggtgggctcgctgctgctgcacggacgattggcggtgcgggagtcagtgcggcgggttcgcccaggaaaagggaacaccgccgtggaacgggaagggctgtacgacactcagctgtcgattcccaacgctcgcttaccgtgaatgttgaggtcggcaagcgtaaagcgtccttcccagtttgtttcatagtcctcgcgcgggaagtcgcccggcgatgcgcctttttccagtgcggccttcaccttgtgcgcgtaggcaagatttttctcgcacattggtgccgcaggaatgtacatcacgttgccccaaccctgttgattttcaacgggggcaacggaatggatgacgtcgcagtgccaccagacggagtctccggcctcgagttttggaatgctggttaacgcctcaattaacagtggatgccattgctctgataccggcaacactcttccgggcgctacgccgcacagttcatcctccggcacatcatcaagcagcggacgtaacagtacgtacgccatggcttcaggaatgggcacaacgtgcagcagcccctgaccaggcagcatattagagagcgctgtccagccttggaatgtccgaaacacggaacatttggtggtgttgtccaccgtgtactcttcaacttccgtacgatgtgccgcatgccagggatcatattgcgccagattgccattaaagacgttggcgaaaacgcgctgatacgctggaagcagccagcgttccagcgccccggagtcggtatgcgctccaagacctttggaggtcgttccgggcggacggcggcggatacggtcagggtagatgacgctcacatccgggttaaaccattgctttccatcactttcaaatgtccacagacgattgagaaacgactgcgcattcgccatttcttcactctggcgggcctgcatttgcgcctgcgaccagtagatggggtaaatctcgggacgtgaagcgctgagcgtcccgaagaaattatcgccggggcctttgtagacctcgtcaaagcggttgcggtccagatagtccagcatcgactgatcccagcctagcgcttgttcgcgggggaaatggccttttatcaccgcacaaccgcgacgtttaatctgttcgcgctgctctgcagtaacatgacctgctttgatatcggcataagacagcaccggccagacggcatcgccctgtgctttgagtgcgttgatttcagccactcgcgtggcaatgtcatcgcttagctgattaaagatctgctggacgtcgccaagctgcgcccgcagcgcgtgcttcatctgacggatagctgctttgtgatcggcaggcaatgtgtcgctggtaaaagtagaagccataaccacctctcattaactttcattcgaaaccattctgatttgcatgcgacaatataagttataaataagttaatgcaagtttaatgatttgatgtgatgtacaggatgtaaaaagaagggaaaaccggagcgcacggctccggtagagaggtcagctgttaaaaggggatgtgttatccagcaccgcctgaatcacattcagcgcgccttcatgattattatcatcggtagcgtaacgggcgatttgtttaatgttttccgcagcattgcccatcgcaaaggaataacgcgccattttcagcatctccgcatcgttaccgctgtcgccaatcgctaccacattttgcggtgacagatcccagcgtttcagtaaccgcgaaataccgtttgctttatgtagaccgggaataatcaggtcgataaagccaaaaccactggtgacgggtttcataatgccattgagcgctatgtgcagtttgtcgatcactaacgggatttgttcatctggcaggttgagcgaaaacttgaacagtacgtcgtcaatctcctgataatcttttacagctttcaggcgatggtagtgttttgccatcagtgcgacaaatgcttcgggggcattttcgctgacatatgcactttgcagaccgcaggcgacaaaattgagttgcttatcttttagcaactcgccaataacaatccgcgattcatgtcgggtcagttcgccgtggaacagttgcttgccatgttcgtaaaccagtgcgccgttttccgcgacaaaagagatctcatcctttagctcaggaaagaacgaaataagctggtaatactgattaccgctggcgacaacgaacttaatgccgcgctttttcagttcctgatattgcgccataaaacgtggttggttgtacgttttggcgtcgttaagaaaagtaccgtccatgtctgtgacgataacttttacgctcataggtgtgctcctggctcgaaaatgaaaccgtaacagtgtaataacaatgtgacgcagagcacaaattatatttcgaatgaaagtaaggatgaaattgatgatgtgaatgatttagcccggcgacgacgccgccgggccgaggagattacagcatatgttcagtacgggcgatgatatcgtcctgtgcgtctggagagagcgcggtgaagaaggcggaatagcccgcgacacgcactaccagatcgcggtactgatccggatgttttttcgcctccagcagcgtttcgcgggaaacgatgttgtactgaatatgccagcctttatgcacttcaaagaaggtacgcagcaggatcatcagtttctgcttgtcagattcgttctccagcgttgccggattcagtttctggttgagcaacacgccgccgagaatcgctgccgtaggcagtttacccactgagccaatgaccgcagtagggccaagatggtcagtaccggaggccgggcttgcgccttctgccagcggggtgtgggctttacgcccgtccggtgttgccatagtttgcgcgccaaacggtacgttagcggagatagacgaggtacccgcgtaatagttgccgccaaccggaccacgaccgtagcgcgggttatggtactgtttcagttcgtcgatataggtctgataagcgcgagccagcagcgtatcgacggtatcatcgtcgttgccgtacttcggcgcaccgttaatcagccgctgacgcagttgctcatgagtcaggccatcgaagtcatccgccagtgcggcagccagctgttgctgaccaatcgcgccctgttcaaataccagtttcttcactgccgccaggctgttgccgaggttggcaatgccaacctgcaggccagaaacccagtcatatttcgcgccgccttgcttgatacttttcgctcgctcaatacagtcatccaccagcgccgagcagagaatatcgtgcacgttctcttccagcatggtgtcgacgacatattcgatttcgattgatttacgcgtgtaataacggatttgcgtatcccacgcgtccattacttcatcgaaattgttaaagttgcctgccgacaacgctttttcttgtggcaggaacactttgccgctggtggcatcacgcccgccttccagcgccgccagcatcacgcgggcgaagttgataaagctcatgccggtacagcgatagccccatttgccaccgacggcggtttcgatacaaccaatcgctgcgtagtcgtaagcgtcctgcggttcaataccgagtttaataaattccgggatcacgatttcgtcgttgttgaacgccggcatcccgaagccgcaacggatcacctgtacgcaggcgtcgaggaaatcattactcattcctgcatggtaacgcacgctgaggttaggctgagtggaacgcaggcgaccgcaggattcgaggatagcgtaagagagtggattcaccgcgtccattggttgaccatcaaccagagtttgtccgccaatggtgacgttctgatacagaggacttcccgcagaggcttttgagtgtgagccggagcggatcttgttcacttccagcagtttcagccagcagctatgcagcaattcgatggcgtgttcgcgatccagtgtctggttgagttcaacgtcgcggcgatagtacgggtagagatactggtccatacgaccaaacgataccgagtgaccgttagattcgatctgcaatatcaattggatgaagtaacacagttgcagcgcctgccagaaagtctgcggcggctggtgggcgataagatcgcagttttctgctatcgccagcagttcatcgcgacggctttcgcgggtttcggtcgcggccatttcacgcgccagggctgcaaaacgttcaatgtgttcgctgactgccaccagcacgatatcaatcgctttcaggaactgttcgccgtgcaaatcttccagtaccgtcagattgatgcgcgagcgacgttccgctactttctcgcgcagaccatcaagacctttttccagcagcagcgggaaattcaccgccaggtgcgcatcgccggaggtcatattgccttccgctttaatgattccggtcgccagcagacctttttgctcatcggtaaacatgccgtagcagcgatcctgtacggtctgaccgcgccaccacgggcacacttcatgcagaacgcgtttgttctcttcgctcaccgcaaagccagcaccgggacgatctgccagatcatcaatctctttttcgatccacgagacagtatattccgggaagatcggcgcggcgcgaacttcgcttgcctggttgccaatgatcaactcatcgtgtttgatccagatggtgcgattcgccaggtgatgcgccagtgccagcgcgcgacgtaccgggatcggcttatcgagatgttgttgatacatctcggtatagtgctgcgcgcgctcggtacagactggcggtttcacaatatgcaccagcgcatttttgtgcgctttaatgcggtcgctgagcgtgtccagtttcagtgtggtcatggttgttatcctcgtaaggtcgcggttaaccctttctggcaggcatactgctgggcaaagtcgagcagttctggcgcatcaagcggtttttccggggcgtcatagggcagattaagtaagtgatatttgttgatgcctagcgtgtggtagggcaggaaatgaatttcgccaacgtgcagctcgtcggcggcaaaatcggtaatagcttttacagaggtttcgtcggcattaaagccctgaatcagcggcacgcggataatgatttttttgcccgctgcggcgagttttttcaggttatccagcactctggcggcgttaccgtcggtccactgtttaaacggcgcgtcggcaacgtgttttaaatcggcaagaaacagatcgatatagggcagagaaggggcgatatatttccacggcacatgcagacaggtttctaccgcagtatgaatgcctgcctcgtggctggcttgcagtagcgccatcgccatttccggctgcataaagggctcaccacccgaaagcgttaaaccgccgccgctgcgatcgtaaaacggtttatcgcgcagaacggtcgtcatgatctcctcaacgcttttcacttcaccacacacggttaatgcctgtgtcggacagcagtcggttaacgccgtcagatgctccggggttaacttttcccgatgaataagcaaaccattcagcgcgcgctcaatcacttccggcgcggccttagcgcacagctcgcagccttccagacacagtcgtgcgtcatacagcagatcctgcgtgcgggcgcggctttccgggttctgacaccagcggcagcccagcgaacagcctttaagaaatacgaccgtgcggataccggggccatcatgggtcgagtagcgctgaatattgaaaatcatagttgcctctctgtttcgttcaaacattaaaatactttcgaatgaaagttagattgatgtgcgtcaactgttcagagagttttcccgtgatagtctacattcagacaaaaagtacattttgaggatggttatggaactgtatctggatacttcagacgttgttgcggtgaaggcgctgtcacgtatttttccgctggcgggtgtgaccactaacccaagcattatcgccgcgggtaaaaaaccgctggatgttgtgcttccgcaacttcatgaagcgatgggcggtcaggggcgtctgtttgcccaggtaatggctaccactgctgaagggatggtgaatgacgcacgtaaattgcgttctattattgcggatatcgtggtgaaagttccggtgaccgccgaggggctggcagctattaagatgttaaaagcggaagggattccaacgctgggaaccgcggtatatggcgcagcacaagggttgctgtcggcgctggcaggtgcggaatatgttgcgccttacgttaatcgtattgatgctcagggcggtagcggcattcagactgtgaccgacttacaccagttattgaaaatgcatgcgccgcaggcgaaagtgctggcagcgagtttcaaaaccccgcgtcaggcgctggactgcttactggcaggatgtgaatcaattactctgccactggatgtggcacaacagatgattagctatccggcggtggaagccgctgtggcgaagtttgagcaggactggcagggagcgtttggcagaacgtcgatttaaccggacgttctgcatcctcataaattgctgatgacgtggcggagtgcaccgatgcctgccgcgcttggaaatctgtgcccgaaccgtaggccagataaggcgttcacgccgcatctggcgtctggagcaaatgcctgatgcgacgcttgtcgcgtcttatcaggcctggaggtggcaattactgcccgcacacctcacaccccggattgcgcatcagtttcatttcgcgaaactgacaggtcatcgcatcgtacatgacgattttcccgctggtcggtttgccataacctgccagcagtttgatcgcttccattgcctgcaacgaaccaattacgccgatcaacggtgccatcacgcctgcttctacgcaggttaatgcgttctcgccaaacaaacggctaaggcagcgatagcacggttcgccgtcctgataagtgaagaccgtgatttgcccttccatacgaattgccgcgccggaaaccagcggcaccttcgcggcaaaacagcctgcgttcagttgattacgtaccgcaacgttatccgtacagtcgagcaccagatcgtgttcagcaatcaatgctgcaagttctgcgtcatctagcagtgcattgactggcgtaatcgcgatatgtgggttgatccgcgtcagggcgtcacgggcggattccaccttcggttgcccgaccgtggcatcactgtgcagtgtctggcgttgcagattcgagagcgaaaccgtgtcgaagtcgagcagcgtcaggttgccgacaccggcgcttgccagatacagcgaagctgcgcagccgagtccaccgaggccgacgatcagcacacgagaatcttttagcgcctcctgaccgtcaaaatcaaaaccgcgcagaatgatttgccggttgtagcgcagcatctcctgatcgctgagttccgccattacaggcctccgaacaacgcgttaaacggttctacttccacccattcgcccacgtccacattgccgcgatcgcgttccagcacgataaagcagttgccgagactaaaggagctaaatatatgtgaaccctgatgtccggtggtcgtcacttcaagttcaccgtcggcgttgcgttgcagcacgccgcgctggaaatcaagacgtcctggcgtttttttcaggcgggacgctgtgcgtacgcgctggcgcgcgggcaggccgctggcggtgttgccgcttagttttgccagcaaaggctgtaccagttgatagaaggtcagcgtcgctgaaaccgggttgcccggcaggccgcagaaccagctattgctgagtttaccgaacgcgaacggtttacctggtttaatcgccagcttccagaaggcgatctcccccagctcttcaagaatcgttttggtgtaatccgcttcacccactgaaacaccgccggaactgatcactacatccgcctggctgtcggcttcaataaatgcggcgcgcagggcatggggatcgtcgcggataatccctaagttgattacctcgcaacccagctgttctaacatcaggtgtacggcgagacggttggtgtcgtagatttggccgtcgcccagcggctgaccgggcaactggagttcatcaccggtagaaaaaagcgctacacgcactttacgaatcaccggaacttcggcaatccccagtgaagcaattactggcagctctgcggtagtcaggcgagttcccgccgggaaaacaaccgcacctgcagagatatcttcaccgcgacggcgaatattttgcccgctacgcacttcagcagtaaaacgcacgccattgtccgtttgttcagtctgctcctgcatcaccaccgcttcgcagccttccggcaccggcgcaccggtcataatacgaatgcaggtgcccgcaggccattcaccatgatacggctgaccggcaaaggatttaccggcaacgggcagcggttgcccggaggcaatatcggctaaacgcaccgcgtagccgtccattgcggagttatcaaaccccggaacatcaagcggcgaaacgacatcgctcgccagaatacgaccaaaacactgtaccagtggcagcgtttcctgggcggtcagtggggtgacgcgagaaagcatctcattaagcgcggtgtcgagcgacatcaatccggtggtaaattccatgaaaacactcctgcggaggcaaaatcgaatttgcctattatgtcagaaaaacgccacagactgtatgccacctcgggcgtagcgttggctcctgcctttacatgccatatccatctttctatattcaaaaattgaatgagtaattcataaaaattctgatatttatagcaaaagtggcgagccacccttaatggacgaatactatgggcaaagcagtcattgcaattcatggtggcgcaggtgcaattagccgcgcgcagatgagtctgcaacaggaattacgctacattgaggcgttgtctgccattgttgaaaccgggcagaaaatgctggaagcgggcgaaagtgcgctggatgtggtgacggaagcggtgcgtctgctggaagagtgtccactgtttaacgccggaattggcgctgtctttacgcgtgatgaaacccatgaactggacgcctgtgtgatggatggtaacaccctgaaagccggtgcggtggcgggcgttagtcatctgcgtaatccggttcttgccgcccggctggtgatggagcaaagcccgcatgtgatgatgattggcgaaggggcagaaaattttgcgtttgctcgtggcatggagcgcgtctcgccggagattttctccacgcctttgcgttatgaacaactactggcagcgcgcaaggaaggggcaaccgtcctcgaccatagcggtgcgccactggatgaaaaacagaaaatgggcaccgtgggggccgtggcgttggatttagacggcaatttggcggcagccacgtccacaggcggaatgaccaataaattacccggacgagttggcgatagtcccttagtgggtgccggatgctacgccaataacgccagtgtggcggtttcttgtatcggcacgggcgaagtcttcatccgcgcgctggcggcatatgacatcgccgcgttaatggattacggcggattaagtctcgcggaagcctgcgagcgggtagtaatggaaaaactccctgcgcttggcggtagcggtggcttaatcgctatcgaccatgaagggaatgtcgcgctaccgtttaacaccgaaggaatgtatcgcgcctggggctacgcaggcgatacgccaaccaccggtatctaccgtgaaaaaggggacaccgttgccacacagtgatgaacttgatgccggtaatgtgctggcggttgaaaatctgaatattgcctttatgcaggaccagcagaaaatagctgcggtccgcaatctctcttttagtctgcaacgcggtgagacgctggcaattgttggcgaatccggctccggtaagtcagtgactgcgttggcattgatgcgcctgttggaacaggcgggcggtttagtacagtgcgataaaatgctgttgcagcggcgcagtcgcgaagtgattgaacttagcgagcagagcgctgcacaaatgcgccatgttcgcggtgcggatatggcgatgatatttcaggagccgatgacatcgctgaacccggtatttactgtgggtgaacagattgccgaatcaattcgtctgcatcagaacgccagtcgtgaagaagcgatggtcgaggcgaagcggatgctggatcaggtacgcattcctgaggcacaaaccattctttcacgttatccgcatcaactctctggcgggatgcgccagcgagtgatgattgcgatggcgctgtcatgccgcccggcggtgctgattgccgatgagccaaccaccgcgctggatgtcactattcaggcgcagatcctgcaattaatcaaagtattgcaaaaagagatgtcgatgggcgttatctttatcactcacgatatgggcgtggtggcagagattgccgatcgggtactggtgatgtatcagggcgaggcggtggaaacgggtaccgtcgaacagatttttcatgcaccgcaacatccttacacccgtgcgctgttagctgctgttccgcaacttggtgcgatgaaagggttggattatccccgacgtttcccgttgatatcgcttgaacatccagcgaaacaggccccccccatcgagcagaaaacggtggtggatggcgaacctgttttacgagtgcgtaatcttgtcacccgtttccctttgcgcagcggtttgttgaatcgcgtaacgcgggaagtgcatgccgttgagaaagtcagttttgatctctggcctggcgaaacgctatcgctggtgggcgagtctggcagcggtaaatccactaccgggcgggcgttgctgcgcctggtcgaatcgcagggcggcgaaattatctttaacggtcagagaatcgataccttgtcacccggcaaacttcaggcattgcgccgggatattcagtttatttttcaggacccttacgcttcgctggacccacgtcagaccatcggtgattcgattatcgaaccgctgcgtgtacacggtttattgccaggtaaagacgcggctgcacgcgttgcgtggttgctggagcgcgtgggcctgttacctgaacatgcctggcgttacccgcatgagttttccggcggtcagcgccagcgcatctgcattgctcgcgcgttggcattgaatccaaaagtgatcattgccgacgaagccgtttcggcgctggatgtttctattcgcgggcagattatcaacttgttgctcgatctccagcgtgatttcggcattgcgtatctgtttatctcccacgatatggccgtggtagagcggattagtcatcgtgtggcggtgatgtatctcgggcaaattgttgaaattggtccacggcgcgcggtcttcgaaaacccgcagcatccttatacgcgtaaattactggcggcagttccggtcgctgaaccgtcccgacaacgaccgcagcgtgtactgctgtcggacgatcttcccagcaatattcatctgcgtggcgaagaggtggcagccgtctcgttgcaatgcgtcgggccggggcattacgtcgcacaaccacaatcagaatacgcattcatgcgtagataacattcaggcggagaataaaatggcaagagctgtacaccgtagtgggttagtggcgctgggcattgcgacagcgttgatggcatcttgtgcattcgctgccaaagatgtggtggtggcggtaggatcgaatttcaccacgctcgatccgtatgacgcgaatgacacgttatctcaggccgtagcgaaatcgttttaccaggggctgttcggtctggataaagagatgaaactgaaaaacgtgctggcggagagttataccgtttccgatgacggcattacttacaccgtgaaattgcgggaaggcattaaattccaggatggcaccgatttcaacgcagtggcggtaaaagcgaatctggaccgggccagcgatccggcgaatcatcttaaacgctataacctgtataagaatattgccaaaacggaggcgatcgatccgacaacggtaaagattaccctcaaacagccgttctcagcgtttattaatattcttgcccatccggcgaccgcgatgatttcaccggcagcgctggaaaaatatggcaaggagattggttttcatccggtgggaaccggaccgtatgaactggatacctggaatcagaccgattttgtgaaggtgaaaaaattcgcgggttactggcagccaggattgcccaaactggacagcataacctggcgtccggtggcggataacaacacccgcgcggcaatgctgcaaaccggtgaagcgcagtttgctttccccattccctacgagcaggccacactgctggagaaaaacaaaaatatcgagttgatggccagtccgtcaattatgcagcgttatatcagtatgaacgtgacgcaaaagccgttcgataacccgaaggtccgtgaggcgctgaattacgccattaaccgtccggcgctggtgaaagttgcctttgcgggctatgcaacgccagctactggtgtggtaccgccaagtatcgcctacgcgcaaagttataaaccgtggccttacgatccagtgaaagcgcgcgaattactgaaagaggcgggatatcccaacggtttcagtaccacgctgtggtcgtcacataaccacagcaccgcgcagaaagtgctgcaatttacccagcagcagttagcgcaggtcgggattaaagcccaggtgaccgcgatggatgccggacagcgggcggcagaagttgaaggtaaagggcaaaaagagagcggcgtgcggatgttctacactggctggtcggcttcaaccggcgaagcggactgggcgctatcgccactgttcgcctcgcaaaactggccaccgacgctgtttaataccgcattttacagcaataaacaggtggacgacttcctggctcaggcactgaaaactaatgatccggcggaaaagacccgcttgtataaggcggcgcaggatatcatctggcaagagtcgccgtggatcccgctggtggtagaaaaactggtgtcggcacacagtaaaaacctgaccggtttttggatcatgccagacaccggcttcagctttgaagacgcggatttgcaataagcaacgcagggagtggaatgcttaattacgttatcaaacgcttactggggttgattccgacgctgtttatcgtctcggtgctggtgtttttatttgtgcatatgctgcccggcgatccggcgcgattgattgccgggctcgaagctgatgcgcaggttatagaactggtgcgtcagcagctggggttggatcagccgctgtatcaccagttctggcactatatcagcaatgctgtgcagggggattttggcctgtcgatggtgtcgcgtcgtccggttgccgatgagattgccagccgctttatgccaacgctgtggctgaccataaccagtatggtctgggcggtgatatttggtatggcggcgggaattatcgccgccgtctggcgtaatcgttggccggatcgattgagtatgaccattgcggtgtcggggatctcgtttccggcatttgcgctggggatgcttttaattcaggtattctccgttgaactgggctggctgcctaccgtgggagcagacagttggcagcactacattttaccctccctgacgctcggcgcggcagtggcagccgtgatggcgcgctttacccgcgcgtcgtttgtcgatgttttaagcgaagattatatgcgtaccgcgagggcgaaaggggtgagcgaaacctgggttgtcctcaaacacgggctacgtaacgcgatgatcccggtagtgaccatgatgggcttacagtttggctttttgctcggtggttctatcgtggtggagaaagttttcaactggcccggacttggacgcttactcgttgactccgtagaaatgcgcgattacccggtgattcaggcggaaattctgcttttctcgctggaatttattcttatcaacttagtggtggatgtgctttacgccgccattaacccggctatcaggtacaagtaaggatgcgactatttaactggcgacgtcaggcggtgttaaacgccatgccactggtcaaacctgaccaggtgcgtacaccgtggcatgaattctggcgacgatttcgccgtcagcatatggcgatgaccgccgcattattcgttattttattgattgtggtggccatttttgcacgctggatcgctccctatgacgccgaaaattattttgattatgacaatctgaataacggaccttctttgcagcactggtttggcgtcgattcactggggcgcgacattttcagccgtgtcctggttggtgcgcaaatctcgctggcggcgggcgtgtttgccgtgtttatcggtgcggcgatcgggacgttgctgggcttgttggctggatattatgaaggctggtgggatcggctgatcatgcgcatttgcgatgtgctgtttgccttcccgggtattttactggcgatcgctgttgttgcggtgttgggaagcggcattgctaacgtgattatcgcagtcgccattttttccatccccgcgtttgcccgactggtgcgcggcaacacgctggtgttgaaacagcaaacctttattgagtcagcacgcagtattggtgccagcgatatgaccattttattgcgtcatatcttgcctgggaccgtctcgtctatcgtggtgtttttcaccatgcgcattggcacctcgattatctctgccgccagcctgtcatttctcggcctcggtgcgcagccgccgacaccagagtggggagcaatgctcaatgaggcacgagcggatatggttatcgcgccgcatgtcgctgtttttccggccctggctatttttctgaccgtactggcgttcaatttgttgggcgatggtttacgcgatgcgctggatccgaaaattaaaggatagttacgtttgaatattgcttgaaagggtaatcacctcacaggaaattattgccctaagcaagtgttgtaactttctgctgattttgtagaatcgggtaatttggttaaaaagccgcagcaagggactatttttgcagcggcacagcgttcagatagttattttgttaaatgtattaacatgctgagtttatacgaaaagataaagataaggctgataattttatttttattggcagcactgtcatttattggtctttttttcatcattaactatcaactggtatcggaacgcgcggtaaaacgtgccgatagccgctttgaacttattcagaaaaacgttggctatttctttaaagatattgaacgttcggccctgacattaaaggactcactgtatttattaaaaaatacagaggagattcaacgcgccgtgattctgaaaatggaaatgatgccatttttagactcggtgggactggtacttgatgataataaatattatctcttttcgcggagggcgaatgataaaatcgttgtttatcatcaggaacaagtaaatggaccgcttgtcgacgagtcagggcgggttatttttgccgattttaacccatcgaaacgaccgtggtcggtggcttcagatgactctaacaacagctggaatccggcatacaattgctttgatcgtccgggtaaaaaatgtatctcttttacgctacgtatcaacggcaaagatcacgatttgttagcgggtgatgctgccaacttactgatttagtgtatgatggtgtttttgaggtgctccagtggcttctgtttctatcagctgtccctcctgttcagctactgacggggtggtgcgtaacggcaaaagcactgccggacatcagcgctatctctgctctcactgccgtaaaacatggcaactgcagttcacttacaccgcttctcaacccggtacgcaccagaaaatcattgatatggccatgaatggcgttggatgccgggcaactgcacgcattatgggcgttggcctcaacacgattttacgtcacttaaaaaactcaggccgcagtcggtaacctcgcgcatacagccgggcagtgacgtcatcgtctgcgcggaaatggacgaacagtggggctatgtcggggctaaatcgcgccagcgctggctgttttacgcgtatgacagtctccggaagacggttgttgcgcacgtattcggtgaacgcactatggcgacgctggggcgtcttatgagcctgctgtcaccctttgacgtggtgatatggatgacggatggctggccgctgtatgaatcccgcctgaagggaaagctgcacgtaatcagcaagcgatatacgcagcgaattgagcggcataacctgaatctgaggcagcacctggcacggctgggacggaagtcgctgtcgttctcaaaatcggtggagctgcatgacaaagtcatcgggcattatctgaacataaaacactatcaataagttggagtcattacccaaaaattcgatcgcggaaatgaaagatgccgaaattgaacggtcaaataaattgctctcactgatctcttacgatcaggaaagcggttttattaaaaatatggcgattattgagtccaacaataatcagtatctggctgtggggatcatcaaactgtgtggtctggaagccgtggaagcggtgtttggtgttgatgaacgcaataaaatcgtcaggaaattgtgtcagcgaattgccgagaaatatgcgcaatgctgcgatatcgtgacattcaatgccgatctctatttacttctgtgtcgggaaaatgtacagacatttacccgtaaaatagcgatggtaaacgattttgacagcagctttggctaccgcaatctgcgcatccataagtctgccatttgtgaacctttgcagggggaaaacgcctggagttacgcagaaaaactgaaactggcgatttccagtatccgtgaccatatgttctccgagtttattttctgtgatgacgcgaaactcaacgaaatagaagagaatatctggattgcgcgtaatattcgccatgcaatggaaattggcgaactattcctcgtctatcaaccgatcgttgatattaacacccgcgccattctgggcgcggaggcgttgtgccgttgggtttctgcggagcgggggatcatttcaccgctgaagttcattaccattgctgaagatatcgggtttatcaatgagctgggttatcagattattaaaacggcaatgggtgaattcagacattttagtcagcgtgcgtcgctgaaggatgatttcttactgcatattaatgtttcgccctggcagttaaacgaaccgcactttcatgagcgttttaccaccatcatgaaagaaaatggcctgaaggcgaacagcctctgtgttgagatcactgaaaccgtgatcgagcgaattaatgaacatttttatctcaatattgaacaactgcgtaaacaaggggtacggatatcgattgatgactttggcaccggtttgtcaaacctgaaacgtttttatgaaattaatccagacagcataaaggtggactcgcaatttaccggcgatattttcggtactgcgggaaaaattgtgcgcattattttcgatctggcacgctataaccggatcccggtgattgcggaaggcgtagagagcgaagacgttgcgcgcgaattaattaaattaggatgtgttcaggctcaggggtatctgtaccagaaacccatgccattctccgcctgggataaaagtggaaaattagtaaaagagtagtttacgtatgtccagaatcaataagttcgtacttacagtcagtctgctgatttttatcatgatttcagcagttgcctgcgggatctacactcaaatggtaaaggaacgggtgtatagcctgaaacagtccgttattgatactgcttttgcggtggcaaatattgctgaatatcggcgtagcgtggcaattgatcttatcaacacgctaaatcccacggaggaacagctgttggttggtttgcgcacagcttacgccgactcggtttccccctcttatttgtacgatgtcggtccttatctgatttccagtgacgaatgtattcaggtaaaggagttcgagaaaaattattgtgcagatattatgcaggttgtgaagtatcgacatgtcaaaaatacagggtttatctcttttgacggtaaaaccttcgtctattacctctatccggtaactcacaatcgtagtctgatatttttgcttggtctggagcgtttttctttactgtcaaaatcgctggcgatggacagcgagaacctgatgttctctctatttaagaacggtaaaccggtgatgaatataatgctaaaaacgccatcttcatcgtttcggaagcgatggagcacttcgcctatttgccgaccggattgtacgtatttgcgtataaaaaagatgtttatttgcgggtctgtacattgattattttctttgccgcattggtggcagtgatatcgggtaccagttgcctctatctggtacgcagagtgattaatcgtggtattgtggagaaagaagccatcattaataaccattttgaacgcgtactggatggcgggcttttcttttcggctgccgatgtcaaaaaactctacagtatgtataactcggcgttcctggacgacctgaccaaagcaatgggcagaaaatcctttgacgaagatttaaaagcgctgccggaaaaaggcggttatttgtgcctgtttgacgtcgataaattcaaaaacattaacgacaccttcggtcatttgctgggcgatgaagtgttgatgaaagtggtgaaaatccttaaatcacagatcccggtagataaaggtaaaatctaccgcttcggcggtgacgaatttgcggtgatttatacgggtggaacgctggaagagttgctatcgattctaaaagaaatcgttcatttccaggtgggaagcattaatttaagtaccagtatcggtgtagcgcattcaaatgaatgtaccaccgtcgaacgcttgaaaatgctggcggatgagcggctgtataagagtaagaaaaacggcagggctcagattagctggcagtaatcattattcgcagggcggacaaatgattttgcccggcctgaattaattaaacccggctaccccacaaatcgtactcatcggcgtgctcgactttcacacgcaggatatcacccggcttaacgttggtttcaccattgagataaaccgcgccgtcgatttccggtgcatctgccatgctgcgaccaatcgcgccttcttcgtccacttcgtcgataatcaccagaatttcacggcccactttctcttgcaggcgctcggcggaaatctgctgctgcagctgcatgaaacggttccagcgttcttctttcacttcttccggaacctggtcaggcagggcattggcgtctgcaccttcaaccgggctgtatttaaagcagccaacgcgatccagacgcgcttctttcaggaagtcgagtagcatctggaaatcttcttccgtctcgctagggaagccgacaataaaggttgagcgtagggtcagttccgggcagatttcgcgccactgtttgatgcgcgccagttggcgatctacagaacccggacgcttcatcagtttgagaatgcgcgggctggcgtgctgcaacggaatgtccagatacggcaggattttgccttctgccatcagtgggatgacgtcgtccacatgcggataagggtaaacgtagtgcagacgtgtccagatccccagtttcgataactgttcgcacaggctgaccatgctggtttttaccggctcgccgttgtggaagccagtacgatgtttaacatcaacgccataggcggaagtatcctgcgagatcaccagaatctctttaacgcccgcatctaccagacgtttcgcttcacttaacacttcgccaatcggacggctcaccaggtcgccgcgcatagacggaataatgcagaaggtgcagcggtgattacagccttccgaaattttcagataggcataatgacgcggtgtcagtttcacaccttgttctggcaccaggctcaggaatgggttgtgtttcggttttggcacgtagtgatgaacgtgctccagaacctgctcatagctatgaggcccggtgatttccagcactttcgggtggacttcgcggatctgatcttcttttgcccccagacaaccggtcacaattaccttgccgttttcattcaacgcttcaccaatggcttccagtgattcttgtaccgcgctgtcaataaagccgcaggtgttgacgatcaccatgtccgcatcgtcatagctcggtaccacgtcataaccttcagtgcgtagttcggtgagaatacgctctgaatcgacaaggtttttcggacagccaagggaaacaaagccgattttcggctggggagttactttgctcatagcttaaaaaatattcagttacaggaaaggtcagggcagggattctacagagttctggataaaatttgtatcgcaatctcattcgctggcggaggcgaaggaaatgtaaattttgttaatttggcgtgaagaattgatcctggacagcattttgctcaaaaaatagccatactatttaatcgcaacaaggctggaaagaggaggatcgaagtatgttcgttgacagacagcgaatcgatctgctgaaccggttgatcgacgcacgcgttgacctcgctgcatacgtgcaactgaggaaggcaaaaggatacatgtccgtcagcgaaagcaatcatctacgagataacttttttaaactgaatcgcgaactgcacgataaatcgctgcggttgaatcttcatctggatcaggaagagtggagtgctcttcatcatgctgaagaagcattagcgacagccgcagtatgtttgatgagtgggcaccatgattgcccgactgttattaccgtcaacgccgataagcttgaaaattgtctgatgagcttaacgctgagtatccagagcctgcagaagcacgccatgcttgagaaggcctgaaaactaagggggagaaagcgtctcccccttcatgtttaagtttttgtaaaaatgaatttgttatctcctccactgactacgctttaagccagagtcaatccggaggcgttatgcatcgacaatcctttttccttgtgccccttatttgtctttcttccgctctctgggcggctcctgcaacggtaaatgtcgaagtactgcaagacaaactcgaccatccctgggcactggcctttttacccgataatcacggtatgttaatcactctgcgcggcggcgagttgcgtcactggcaagcaggaaaaggattatctgcgccgctttccggagttccggacgtttgggcgcacgggcagggcggcctgctggacgtggttttagcgcctgattttgctcagtctcgccgcatctggttaagttattccgaagttggcgatgatggcaaagccggaactgctgtgggttatggccgcttaagtgatgatctctcaaaagtgaccgacttccgcaccgtcttccgccagatgccaaaactgtctaccggcaaccattttggcgggcggctggtattcgacggtaaaggttatctttttattgctctgggcgaaaacaatcagcgcccgacggcgcaggatctggataaattacagggcaaactggtgcgtctgaccgaccagggcgaaatcccggatgataatccttttataaaggaatccggtgcgcgcgccgagatctggtcttatggcattcgtaatccgcaaggaatggcgatgaatccgtggagtaatgcactgtggctgaatgaacatggcccgcgcggtggtgatgaaattaatatcccgcaaaaaggcaaaaactacggctggccgctggcaacctggggaatcaactattcaggctttaagataccggaagcgaaaggggagatcgtcgccgggaccgagcaacctgttttttactggaaagattcgcccgctgtgagcggcatggccttctataacagcgataaattcccccagtggcagcaaaaattatttattggcgcgctgaaagataaagatgtcattgtgatgagcgtcaacggcgacaaagtgacagaagatggccgtattttaacggacagagggcagcgaattcgtgatgttcgcactggacccgacggttatttatacgttctcaccgacgagtccagtggggaattacttaaagttagcccacgcaattagctaacgggaatcatcaccactttgcgcactgcggggcgttcagtgagttgctgataccagcgttgcagatttggacgcggtgtccaggtcaggccaacgttaaacaaattgtagatgaacggtgcgatagcgatatcgcccacaccaaactcgtcgccagagaaccattttacttttgccagttccgcatcgagcagggcaaacagggcgtcgcactctttgcaactggcatcaatggcggcctgatcgcgctcttccggtggtgttctgactaatcccatcaggatcccgcgatgagcattactgagcgtctggtttgcccagtccatccatttttccgcttccgcacgacgtgccggtgagtcgatccacaggcgtttttgcccgtactgtgccgccagatagcggacaatggcgtttgattcccaaagaatgagatcactttcgtcgtcacgcaacaacggcaccagcccgttagggttcatcgccagaaaatcagcatcgtgatttatcccaaactcacggcccgcgagaatttgctcataaggtagttccagttcttcgagcgtcagcaatacttttttacgttagttgaattattccgaccccacagcgtaatcatactcaccccttttccgacaggcagccacaggctgaacaggactccgatggtgaagtaaagttaacttttaagcaacagctggcaaaaaaatgacaccagaagcagcgaagcggcaggatattgcataaactttaaaaactttaccaacttacggtttctttaagtttgtgtgtgcgttattaatcaccgaacttatcatacggcgatataacgtattttttttgaatggatactcgggtggcatttatgacgcaatactcctctctccttcgtggtcttgcagcgggttctgcatttttattcctttttgccccaacggcattcgcggcggaacaaaccgttgaagcgccgagcgtggatgcgcgtgcatggattttaatggattacgccagcggtaaagtgctggcagaaggcaacgcggatgagaaactggatcccgcgagcctgactaaaatcatgaccagctatgtggttgggcaggcgcttaaggccgataagattaaactcaccgatatggtgacggtcggtaaagatgcctgggcgacgggaaatccggcactgcgtggttcatcggtaatgttcctcaaaccgggcgatcaggtttcggtggcagacttgaacaaaggtgtgattatccagtccggtaatgacgcctgtattgcgctggccgattacgttgccgggagccaggagtcatttattggtttgatgaatggttatgccaaaaaactgggtctgaccaacactaccttccagacggtgcacggtctggatgcgccggggcagttcagtaccgcgcgcgatatggcattgctgggtaaagcattgatccacgatgtgccggaagagtacgccattcataaagagaaagagttcaccttcaacaaaattcgtcagcctaaccgtaaccgtctgctgtggagcagcaatctgaatgttgatggcatgaagacaggaaccacggcaggtgcgggatataatctggttgcttcggctacccagggtgatatgcgtttaatctccgtagtgctgggggcgaaaactgaccgtatccgttttaatgagtctgagaaattattgacctggggtttccgcttctttgaaactgtgacgccaattaaacctgatgccacctttgtgactcagcgcgtctggtttggtgataagagcgaagtgaatctcggggcaggcgaagcgggctccgtgaccataccgcgtgggcagctgaaaaacctgaaggcgagctacacgttaacggaaccgcagcttaccgcaccgctgaaaaaaggtcaggttgtcgggaccattgatttccagcttaacggtaaatccattgagcagcgtccgctgatcgtgatggaaaatgtggaagagggcggattctttggtcggatgtgggatttcgtgatgatgaaattccatcagtggttcggcagctggttctcttaatcttctgataaccggatggcgcgaaacgtcatccggttatacgtcattaatacatcaacttaatacggtgcgtctgcgcgtacttcacatactcatcttccgggcaacaatcactcaccacaatatcaaagcgtttcaggtcacccatgcgcgccggacgcaccttgccaaatttactgtggtcgacaaccagcacatgcttttgcgccatcgacatggcccagtgttttaccggcaactcttcaagattaaaacaggtagcgcctttactgacatgcacgcccgccgcggaataaaaagcgatatccgggcaaaaattattcaacgtttgctgaaaatcgatggggttgaaaatggcgttgctggcgtgaaattcaccaccgcacagaaatgcgcggcaatggggtttctctttcagcgccagaaaggtatttagcgaataacaaacggcggtaaaagggatttcattatcaatcgcttcaataatccacggcgtggtggtgccacagtcaaaaaagagggtctgatcgggttctaccagtgtcgcagccagttttgccgcccggcgtttttcttccaccaggcgggatttttgatcgcttaacaggtaatggctggcactgcgcggttccagaacaatatagccgccgagcaaaacgacgggcgcactgtggttgttcagatcgcgacgaatcgtcatctccgaaaccccaagcagggcggcggcgtctttaagatgtaacttatcgctgcgttttaattcttgcagcagctgcccgatacgctcttcgcgacgtgtttccataatccctctgaatagttattgaagcgagccgctcaatactacactttttagcagagatcagtcacgcacccagcctttgcggatcggtaatgcaaaacagacgcgataccacgattgcagacgttgatagagtttatgccccatcgcttgccagataatctgggcactaaggcagccaatcatacctgccagcaatccaccgagcatatccagcggccagtggacgccaagataaacgcgcgaccaggcaatgacgacggccagaaccattaaaagtgagccggaccacaggcgatgccagcataaaaatgccagtgcaaaggtgaaaatcaccgtaccgtgatcgctcgggaatgagtcatccgccgcatgatgcaggaagttatagccgatattttcgacaaagggtcggtcgtgcggaaaaagatgtcccatcgtccaggacacaaacaggctgaccgccagcgcgatagcgatttttatcaccagttgccgttgtgctgtaagcccccacaaccaaagtaccgcggccagcaacggcaccacggtaatcaaatctttagcaataaaaatcgccaacgagatcatccacggagccgagtctggcgtcgcgttaataagagagaatagagagagattcaaattttccagcataacttcccgacgcaaagtgattaaaagggagccaatacaggcaagtcgttgagaataaagtgcaggttaaactgggtaaagcggcatcgtcttatttccctcaagcggcctgtttacggtgggtgattgtaacgggcataggttaaataaaacttaaagaaagcgtagctatactcgcaataatgtaagaatgtgcttaaccgtggtttcagctacaaaattcgctttctcgttagctgcgcttttattaaactctgcgcgattattattggcgaagaaattgcatgcaaaataaattagctttcggtgccaggcttggacgtcaggcgttacttttccctctctgtctggtgctttacgaattttcaacctatatcggcaacgatatgatccaacccggtatgttggccgtggtggaacaatatcaggcgggcattgattgggttcctacttcgatgaccgcgtatctggcgggcgggatgtttttacaatggctcctggggccgctgtcggatcgtattggtcgccgtccggtgatgctggcgggtgtggtgtggtttatcgtcacctgtctggcaatattactggcgcaaaacattgaacaattcaccctgttgcgcttcttgcagggcataagcctctgtttcattggcgctgtgggatacgccgcaattcaggaatccttcgaagaggcggtttgtatcaagatcaccgcgctgatggcgaacgtggcgctgattgctccgctacttggtccgctggtgggcgcggcgtggatccatgtgctgccctgggaggggatgtttgttttgtttgccgcattggcagcgatctcctttttcggtctgcaacgagctatgcctgaaaccgccacgcgtataggcgagaaactgtcactgaaagaactcggtcgtgactataagctggtgctgaagaacggccgctttgtggcgggggcgctggcgctgggattcgttagcctgccattgctggcgtggatcgcccagtcgccgattatcatcattaccggggagcagttgagcagctatgaatatggcttgctgcaagtgcctattttcggggcgttaattgcgggtaacttgctgttagcgcgtctgacctcgcgccgcaccgtacgtgataattatgggcggctggccgattatgattggtctgttggtcgctgctgcggcaacggttatctcatcgcacgcgtatttatggatgactgccgggttaagtatttatgctttcggtattggtctggcgaatgcgggactggtgcgattaaccctgtttgccagcgatatgagtaaaggtacggtttctgcggcgatgggaatgctgcaaatgctgatctttaccgttggtattgaaatcagcaaacatgcctggctgaacgggggcaacggacagtttaatctcttcaaccttgtcaacggaattttgtggctgtcgctgatggttatctttttaaaagataaacagatgggaaattctcacgaagggtaaaaaaatgcctgactgctttgtgcgatcaggcattctcgaattaatggtgatggtcgtcaatctggtgttcgataaccatcccttcacctacgctggcaagatggcgagcataaggatgcgggcggtaagccggagctggcgcaggagccacatagacggtttgcggcacagtcgcgacgctgaccgcttgtggaacgctgactgaatcaggaactacaaccactttgtatccactcggcacatcgccggtgacactttgcgccatcgccacaccagtaaagcccattaaaagcgcgcccaacagtagacaatttttcataatcatttcgcctgaaataatgcagcgggttaatttccgcgaattatgcagccttcattcaggtattgtgttgccgggcgtgctgccgtttttattggtcaaatggcgcttcgtgtttaagcactttatcgatcacatccagtacgccttcacggttattggagcctgcccggtattttgccgctgcgacgaccgcgctgccggcattttccattgcaaaactaaagcctgcctgacgcagcatctcaatatcgttaccgccatcgccaaagaccaccacttcgctgtcgtctattccccataatttctgcagttggcgaaggccattggctttatgtacgccggggataatcagatcgatgctgccgttgccggtgtggactggcaccataatatcgccgatggcctcatgtaatgctttttgtacttgtggaatcagttcatcggaaagattcaggccaaacttaaagaaaatatcttctaagttgtcaaagttatcgacgtattccagacggtgataatacatttctgccaccgttttcatggcatcgtcatattttttgagcgtataggcgctattttttccgcaggcaataatttccacttccgggcgcgtcagcaaatgttccacgacagtagtaaaggcatccttcgacagctcgccattaaaaacatctttgccttcactcactacccagccgccgttttcagccacaaaggcaatttcattagcaatttcagggaagaaagagagcaactgataatattgattcccgctggcgaccacaaagcgaatgccttgtgctttcatttgctgatactgagccataaaccgctcacggttataggttttttgatcgcttaagaaagtaccatccatgtctaccgcaattaatttaatgctcatcaactattctccatcgccgtccgcgttttggtatcgggtttggcgacggctttcgcgacaatagccgcgagaataaccagcgccagtacaaccagcattgcactacgtaatccataatgttcgccgagatagcccagcagcggcggcccgacgaggaaagccagataaccggtcgttgctaccacactgacgcgggttggtgcatcggggccggtatcgctggcggcagaaatggtcagcgggaagcccagcgaggcacccagtccccagagtacaacagacaccccagcgacccaggcgctatcgacaaaaataatcagcccaatacccaacgcccccattagtgcactggcccgaaccacggcaacgcgactgtaacggtcgatgaaccaaccgccagtgaagcgtccaacggtcatccctagggtaaaaccggcataaatcagcgagccggaagtagggctaaaaccgtgaccgtcaaccattaataagggtaaccagtcgttggcagaaccttcggcaaaggccatcgccagcactacaacaccaatcaacagcaactggatatcgcgataaaaaggaatgcctttttcgccatgctgggtgccatcggcagcatttttgcccgtaccgtcagggattgcctgaatggcgatataaataggcgcgatacctaccagcgccgccaataaaatgtgcaccgttgccggaacgccaaaggccgtcagtgccatcccgacaccagcgcctgccagcgtgcctaggctataaaaaccgtgcatcatcggcaaaaccgttttattcatttctcgctcaacggcggcaccttcaacgtttatcgccacttccgcagaaccaaaacttgccccaaagacgccgagaccaacggcaaagagcaggggcgatgtcagccagagtgccagacttaatatcatcatcccgatcaatgcgcaggacatcgtgaccaggatgacattacgtgtcccaaagcgtttcactaaccacgccgagcagagaataccgctcatcgaaccgatcgacagaccaaagagaacaccgcccatttcagcgatcgagacagagagaatatcgcggatagcaggcgtacgggttgcccaggacgccattaacaggcctggcaaaaagaagaacataaacagcgcccaggttcggcgtttcaatgcattacgtgaagaatttacggtcatagatcacgtcaaaataagaagagggaagacaacattagcaaggttgtgtacatttgtacacaattgcagacagaggaaatgacatgcgtcgcgctaacgatccgcaacggcgagaaaaaattatccaggccacgctggaggcggtgaaactttacggaatacatgctgttacgcaccgcaaaattgctacccttgccggggtaccgttgggatcgatgacctactatttttcaggaattgatgagttgttgctggaggcgttcagcagttttactgagattatgtcccggcaatatcaggcattttttagcgatgttagtgatgctcaaggcgcatgccaggctatcaccgatatgatctacagctcacaggttgcaacgccggataatatggagctgatgtaccagctctacgcgctggctagccgaaaaccgctattaaaaacggtaatgcaaaactggatgcagcgcagtcagcaaacgctcgaacaatggtttgaacccggaaccgcccgcgcgcttgatgcgtttattgaggggatgacgctgcattttgtcaccgaccgtaagccgctatcgcgcgaggagattttgaggatggttgagagggttgcagggtagtagataaattttagataacaaaaaacccatcaaccttgaaccgaaatggcggggttgatgggctccacaaaatggggacatcaaagaaaagcagtggcactaattaagactgatgccctgcggaaaagttctgcggttgtgcaaaaaaatttcattttcagggcaacttcagttttatcctaatcctggccataccatgacgatgattgtccctgccagcgtcagcaggacgttggcgattgcgtaggtgcccgcatagcccagcgcagggatgttactgcgagctgtatcactgatgatctccattgccggcgcgcaggtgcgtgcgcccatcattgcgccgaacaacagtgcgcggttcattcgcaatacataagcaccgaacaagaaacagataaccacgggcacaagactgacaattaatccggcaatcaacatctgaccgccaatcgcgcccaggccgttattaataccgctaccggcgctcagaccaacgcctgccataaacaccatcaagccgaactctttcaccatgcttaatgcaccttgcggaatgtaaccgaaggtcgggtggttagcacgcataaagcccagcataattccggcgaataacaacccggcagcgttccccatgccgaaactgaatgtgctgaactggaaggtgatcatcccgatcatcagcccaataacaaagaaggcgcaaaatgccagcaggtcagtgacctggctgtgaatcgagataaagccgatgcgatcggcgatggtttttacgcgacgggcatcaccgctgacttgtaaaacgtcacctttgttaagcacgacgttgtcatctatcggcatctcaatctggctacgaatgacgcggttaaggaagcaaccgtgatcggtcaacttcagttgtgcgagacgtttacctacagcgttatggtttttaacgaccacttcttcagtgacgatacgcatgtcgagaaggtcacgatcgaaaacttctttaccgttacggaagctgggatcgagtcgggcatgggcgtcgggatagcctaccaacgctatttcatcgcccatttgtagcacggcatcaccgtctggatttgccagaatcccgttacgtcgaatacgttcaatgtagcagccggtttgtcgataaatacccagttcacgcagatttttgccgtcggtccaggccaccagctccgggccgacgcgataggcgcggatcaccggtaaataaaccttacggttggcatcagtgtccaggccacgttcgcgggcgatttgctgggcgctggtctgtaagtcctgatgctgcaatttcggcaagtaacgcgcaccaacaatcaaactcaccagaccgattaaataggttaaggcatacccgaggctcagattatccagtgccagtgagagctgcctgctttccatgccggaatgacgcagtgtatcgccagcaccgaccagaaccggtgtcgacgtcatagagcctgctaacataccggccgtcaggccaatatcccagccaaacagcttacctaaccctaaggcgatcaccagcgcactgccaaccatcaccagtgctaacattaggtaatttttcccatcgcgaaaaaaaatggaaaaaaagttcggtccggcttcgaccccgacgcagaaaataaacagcataaagccaagattaagcgcatcggtgttaatgctgaaatgttgttggcctaataacagcgatacgactaaaacgccaatggaattacccagttggatcgaaccaagtcgtaactttccgagacatagcccaagcgcgaggaccacaaataataacagaatgtaattcccatttaacaattcggcgacgtttatattcacggaggctaacttcttgtttactagtaagctgttgaaagaaatggtaatttacgataatgttttttaccagaattcagggcgcagattcattcagcgcacctaaacgatagtaaagtaacaatatattttactagtgtaatcacattaggtatcaacggctatatgaattgcgttggcctatattagcatggaatgcgaagcggctttatcttactgaacgccacactggcgaaaaatgtgttcgatagacgcagtgtcaggaggaacgagtgaaacataaacaacgttgggcgggggcaatctgctgttttgtcctcttcattgtggtgtgcctttttctggcgacgcacatgaaaggcgcttttcgggctgccgggcatcctgaaatcggcttgctgtttttcattcttcctggagcagttgccagtttcttttcacagcgtagagaagtcctgaaacctctatttggcgcaatgctggcggcaccctgttcaatgctcattatgcggctgtttttttcaccgacgcgctcattctggcaagagctggcatggttactaagcgcggtgttctggtgtgcgctgggggcactgtgtttcttatttatcagtagtttgtttaaaccacagcacagaaaaaatcagtaaagccctcaacgcgagggcttgtcagacgatcaggcgtccagattttctttcacccatgcagcaaaatcggtatagccgccgatatgttgctgatcgacaaaaatctgcggcacggtttctacgggtttacctgccttttgttgtagatcttctttagtgatcccttccgcacgaatatctacatactgatactgaaaatcatcgcgttcattgctcaatttctcagccagatcttttgcacgcacacagtaagggcaacccgaacgaccaaaaataacggtttgcattatttctctcctcatagatttatgcctgtaatgatcacgctaaaatgtattcgctgaaagtaggtttaacctgttgcattaattgctaaaagctataactgttaaacacaatacagtgaaaagttttagactgaaggctcactttgcagagggaagcgtatgcgcgcgatcggtaaattgcctaaaggcgtgttgatactggaatttatcggaatgatgctactggcggtggcgctgctgtcggtaagcgactccctgtcgctgcctgagccattttctcggccagaagtgcagattctgatgatttttctcggtgttttgctcatgcttcccgctgcggtggtggttattcttcaggtggcaaaacgtcttgccccacagctgatgaaccgtccaccgcaatattcacgttcagaaagagaaaaagataatgacgccaaccattgaacttatttgtggccatcgctccattcgccatttcactgatgaacccatttccgaagcgcagtgtgaggcgattattaacagcgcccgtgcgacgtccagttccagttttttgcagtgtagtagcattattcgcattaccgacaaagcattacgtgaagaactggtgacgctgaccggcgggcaaaaacacgtagcgcaagcggcggagttctgggtgttctgtgccgactttaaccgccatttacagatctgtccggatgctcagctcggcctggcggaacaactgttgctcggtgtcgttgatacggcaatgatggcgcagaatgcattaaccgcagcggaatcgctgggattgggcggggtatatatcggcggcctgcgcaataatattgaagcggtgacgaaactgctgaaattaccgcagcatgttctgccgctgtttgggctgtgccttggctggcctgcggataatccggatctcaagccgcgtttaccggcctccattttggtgcatgaaaacagctatcaaccgctggataaagacgcactggcgcagtatgacgagcaactggcggaatattacctcacccgtggcagcaataatcgccgggatacctggagcgatcatatccgccgaacaatcattaaagaaagccgcccatttattctggattatttgcacaaacagggttgggcgacgcgctaaaaccgccacgtcgatgtatgatacgcgggcttttgaccaggtctgacagagaggtgcagggtgaaaattgccatattgtcccgggatggaacgctctattcgtgtaagcggctgcgtgaagccgctatacagcgcggtcacctggttgaaattcttgatccgctttcttgctacatgaacataaatcctgcggcgtcttctattcactacaaaggccgcaagttaccccattttgacgcagtgatcccgcgtattggcaccgccattaccttttatgggacggcggcactgcgccagttcgagatgctggggagctatccgctcaatgagtcggtcgccattgcccgggcgcgtgacaaattgcgttccatgcaactgctggcgcgtcagggcatcgacctgcctgtcacgggcattgcgcattcgccggatgataccagcgatttaatcgacatggtcggtggtgcgccgctggtggtcaagttggttgaaggcacgcagggaattggcgtcgtgctggcggagacgcgtcaggcggcggaaagcgtgattgacgctttccgcggtctgaacgcgcatattctggtgcaggaatatatcaaagaggcgcaagggtgcgatatccgctgtctggttgttggcgatgaagtggtcgctgcgattgaacggcgggcgaaagagggcgattttcgttccaatttgcatcgtggcggcgcggcaagcgtcgccagtatcacaccacaggagcgtgaaatcgcgataaaagccgcgcgaacgatggcgctggacgttgctggtgtggatattctgcgtgctaatcgcgggccgttggtgatggaagtgaatgcgtcgccggggctggaaggaatagaaaaaaccactggtatcgacatcgcgggtaaaatgatccgctggatcgaacgccacgctacgacagaatattgcctgaaaacgggtggttagtcgcaatcacattactgatcatggttttgcctgcgctttttgcgtaagctgtgccggtctttttatcgaaagaggttgtacaaaattatgacatcgctggtcgttcctggtctggatacgctgcgtcaatggctcgatgacctggggatgagtttttttgaatgtgataactgtcaggctctgcatctgccccatatgcagaatttcgacggtgtctttgatgccaaaatcgatctgatcgataacacgatcctgttttctgccatggcggaagtccgaccttcagccgtattgccgctggcggcggatttatctgccatcaatgccagttcgctgaccgtgaaagcatttcttgatatgcaggatgataatctgccaaagctggtggtttgccagtctttatccgttatgcagggcgtaacctatgagcagtttgcatggttcgtgcgtcagagcgaagagcagatttcgatggtcattcttgaagctaatgcccatcaactgctgttaccgactgacgatgaagggcaaaacaacgttaccgaaaactatttcctccactgataactcctttcgagcacgcagtcgctggtgcagtggctgcgcgctgcaaaattatctgctgtttttaaccttttcttaaagattatttcacttctcttgtgtcgatttggctttatcacatagagcaaatacgcataaaaatttgttaaataccgttttttaatccgagctatagtctcaaaccctggctaaagttattcttgcgatgcttttatatagcgagcagtgctggccgggagagagttctcttttcttacaccccgccgataaaaaatatgcacgtttattgcatatcttttagtgtgacaacttttgttcgtttgttaacgaactttcagaaggaaagagatatgaccgccttaaataaaaaatggctttcgggtctggctgcgggtgctctgatggccgtctctgtcggcacgctcgcggctgaacaaaaaacactccacatttataactggtctgattatatcgccccggacacggtggccaattttgaaaaagaaaccggtattaaagtcgtctacgatgttttcgactctaacgaagtactggaaggcaaattaatggcgggtagcaccggctttgacttggtggttccatctgccagctttcttgaacgccagttgactgcgggagttttccagccgctggacaaaagcaaattgccggagtggaagaatctcgacccggagctgctgaagctggtcgccaaacacgatcccgacaataaatttgctatgccctatatgtgggcgacgaccgggattggctataacgttgataaagttaaagctgtgctgggcgaaaacgcgcccgtcgatagctgggacttgatcctcaaacctgaaaatctggaaaaactgaaaagctgcggtgtctctttcctggatgcgccagaagaagtttttgctaccgtgttgaattatctcggcaaagatcccaacagcactaaagcggatgattacaccggaccggcaaccgatctgctgttaaagctgcgcccgaacattcgttatttccattcatctcaatacattaacgacctggcaaacggcgatatttgcgtcgctatcggctgggcaggtgatgtctggcaggcgtcaaaccgcgcgaaggaagcgaagaatggagtgaatgtctcgttctcgattccaaaagaaggggcgatggcgttctttgatgtattcgccatgcctgcggatgccaaaaacaaagacgaagcctatcagttcctgaattacctgctgcgcccggatgtagtagcgcatatttccgaccatgtgttctatgccaacgccaataaagcagccacgccgctggtgagtgcggaagtccgtgagaacccgggtatttatcctccggcggacgttcgtgcgaagctattcactctgaaagtacaggatccgaaaatcgaccgtgtgcgcacccgcgcgtggaccaaagtgaagagcggaaaataatccgcagccttagatgccgggcgggcgcaccacaccagccggcaattcgcaccatcatggtgcgcttgcacacattcaatgccggagagcagccgtgaatgacgctatccctcgcccgcaggcgaaaacccgtaaggcgctgacgccgctattagaaatccgcaacctcaccaaatcctacgatggtcagcatgcggtcgatgatgtcagcctgaccatctacaaaggtgaaatcttcgcgctgctgggcgcatccggctgtggcaagtccacgctgctgcgtatgctggcaggttttgaacaaccttctgccgggcagataatgctcgatggcgtcgatttgtcacaggtgccgccttacctgcgccccatcaatatgatgtttcagtcttacgcgctgtttccgcatatgaccgtggaacagaacatcgcttttggcctgaaacaggacaaactaccgaaagcggaaattgccagtcgggtccatgagatgctcggcctggtgcacatgcaggagttcgccaaacgcaaaccgcatcagctttccggtggtcagcgacagcgtgtggccctggcccgaagccttgccaaacgcccgaaactattactgctcgatgagccgatgggcgcgctggataaaaagctgcgtgaccggatgcagcttgaagtggtggatattctggagcgcgtcggtgtgacttgtgtgatggtcacccacgatcaggaagaggcgatgaccatggcggggcgtatcgccattatgaatcgcgggaaatttgtccagattggcgagccggaagagatctacgagcatccaactacccgctacagcgctgaatttatcggttcggttaatgtctttgaaggtgtactcaaagagcgtcaggaagatggcctggtgcttgattcgccggggctggtgcatccactgaaagtcgatgcggatgcttcagtggtcgataacgtgccggtacacgtagcgctgcgcccggaaaaaatcatgctttgcgaagagccgcccgccaatggttgtaacttcgcggtgggggaggtgatacacattgcctatctcggcgatctttcggtgtatcacgttcgactgaaaagtgggcagatgatcagcgcccagctacaaaacgcccatcgtcatcgtaaagggttaccgacctggggcgacgaagtgcgtttgtgctgggaagtggacagctgtgtggtgctgacggtttaaggagcaaagatgagtacacttgaacctgctgcccagtcgaaaccgccgggcggatttaagctgtggttgtcgcagctgcaaatgaagcatgggcgcaaactggtcattgcgttgctatatatctggttgatcttgctgtttctgctgccatttctgattgtctttaaaataagcctgggagagatggcgcgcgctattccaccttataccgaactgatggagtgggctgacgggcaactttccatcactcttaatctcggtaattttctgcaactgaccgacgatccgctctattttgatgcttatctccagtcgttacaggtggcggcgatttcgacattttgctgtttactgatcggctatccgctggcgtgggcggtggcgcacagtaagccttcgacccgtaatattttattactactggtgatcctgccgtcgtggacctcgtttctgatccgcgtttatgcctggatgggaatattaaaaaacaacggtgtgctgaataattttctgctgtggctgggggttatcgatcaaccgctgaccattctgcataccaatctggccgtttatatcggcattgtttacgcttacgtgccgtttatggtactgccgatttataccgcgttgattcgtattgattattcgctggtggaagcagcgctggatctcggtgcacgaccgctgaaaacgttctttactgtgatcgtgccgctgactaaaggtgggattattgccggatcgatgctggtgtttatcccggctgtgggcgagtttgtgatcccggaactgctcggtggcccggacagcatcatgatcgggcgcgtgttatggcaagagtttttcaataaccgcgactggccggtggcctcggcggtagcgatcatcatgttgctgctgctaattgtgccgataatgtggttccacaaacaccagcaaaaaagcgtgggagaacacggatgaataatttaccggtagttcgttcgccctggcggattgtgattttgctgctgggctttacctttctctacgcgccaatgctgatgctggttatctattcgtttaacagctcgaagctggtgacggtgtgggccggctggtcaacgcgctggtatggtgagttattgcgcgatgacgcgatgatgagtgcggttggtttaagcctgacaattgctgcctgtgcggcaacggcggcggcgatcctcgggactattgcggcggtggtgctggtgcgttttggcaggtttcgcggatcaaatggttttgcctttatgatcaccgcgccgctggtgatgccagatgtcatcacgggcttgtcgctgttgttattattcgtcgcgcttgctcatgccattggctggcctgcggaccgcggtatgctcaccatctggctggcgcatgtcactttttgtacggcttatgtggcggtcgttatttcttcaagattgcgggaactggatcgctcgatagaagaagcagcgatggatctcggtgcgacgccgctgaaagtgtttttcgtcattacgctaccgatgatcatgcccgcgatcatttctggctggttactggcttttactttgtcgcttgatgatctggtgatcgccagctttgtttccgggccgggagccaccacgttaccgatgctggtcttttccagcgtgcggatgggagtgaatccggaaatcaacgcccttgcaacgttaattctcggtgcggtcggaattgtcggatttatcgcctggtatctgatggctcgcgcagaaaaacagcggatacgcgatatccagcgtgcaagacatggctgaagacactaaaatttgccaacctggctacataatgccgcgcatgccgcggcattgttttcatggaagacgaaacgttgggattttttaagaaaacatcttcatctcatgctcgcctgaatgtgcctgcgctggtgcaggtggcggcgctcgccattattatgatccgtggcctcgacgtgctgatgattttcaatacgctgggcgtgcgcggtattggcgagttcattcatcgcagcgtacaaacctggagtttaacgctggtctttttaagcagtctggtgctggttttcattgagatctggtgtgcgttttcactggtgaaagggcgtcgctgggcgcgctggctatatctgctgacacaaatcaccgccgcaagttacttgtgggcggcttcgctggggtacggttatccggagctgttcagcattcccggtgaatcaaaacgtgaaatcttccatagcctgatgctgcagaagctgccggatatgctcatcctgatgctgctgttcgttccctcgaccagtcggcggttcttccagttgcaataatgtgtataatcgtcgcccctgatgatgtgaaggtcaatgtatgcagtgcgcactttacgacgcgggtcgctgtcgttcctgtcagtggataacgcagccgattccagagcaactctccgctaaaaccgccgatcttaaaaatctgctcgccgattttccggttgaggaatggtgcgcgccggtgtcaggcccggaacaagggtttcgtaataaagccaaaatggtggtgagtggtagcgttgaaaaaccactgctcggtatgctgcatcgcgatggcacgccggaagacctttgtgactgcccgctttatcctgcctcttttgcgcccgtttttgcggcgctaaaaccgtttatcgcccgtgcggggttaacgccctacaacgtggcgcgtaagcgtggcgaactgaaatacattctgctgactgaaagccagagcgatggcggcatgatgctgcgctttgtactgcgttctgaaaccaaactggcacaactgcgtaaggcgctgccgtggttacaggaacaactaccgcaactgaaagttattaccgtcaatattcagccggtacatatggcgattatggaaggggagacggagatctacctgactgaacaacaggcgctggcagagcgttttaatgacgtaccgctgtggatccgtccgcaaagtttcttccagactaatccggcggtcgccagccagctgtacgctaccgcgcgcgactgggtacggcagctgccagttaaacatatgtgggatctgttctgcggtgtgggtggctttggtttacactgcgcgacgcctgacatgcagttaaccgggatcgaaattgcatcagaggccattgcctgtgcaaagcagtcagccgctgaactgggcttaacgcgtttgcaatttcaggcgctggactccactcagtttgccaccgctcagggggatgtgccggagctggtgctggttaacccgccgcgccgcggcattggtaaaccgctgtgtgattatctctcaacgatggcaccgcgttttattatctactccagctgtaacgcccaaaccatggcgaaagatatccgcgaactgccaggttaccgcatcgaacgggtacagctttttgatatgttcccgcacaccgcgcactatgaagtgatgacgctgctggtgaagcaataaaaaagccgcaggtgcggcttcagattgctgatcaggtgcgctttgttcatgccggatgcggcgtgtacgccttatccggcctacaaaatcatgctaaatcaatacattgcagagttgatgtgggccagataagcgcagcgcatcaggcaatcttacttttgtcatcagtctcaattactgcgggaaccactggtcattgattttctgatatgtaccgtcagctttaattgctgccagcgcgttattcagtttttccagcagagctttgttatccggacgtacagcgatgcccagaccggtgccgaagtattgcggatcggtcactttttcagtagcaacgcccagttgcggattggttttcagccattcgtttaccaccgctgtgtcaccaaataccccatcaatacgaccatttttcagatcgataaaggcattctgataactgtcataggagacagttttcacttcggggtgctgatcctgaatatatttctggtgcgtggtgccgttttccatcccaatacgtttgcctttcagatcggcaaacgttttgtaggtatcttttttggcaatcacgacggctgagttttcatagtagggcgtggtaaacgatacctgcttgctacgctcgggcgtgatatccataccggagattacggagtcatattttctgaatttcagtgacgggatcaggctgtcgaacgcgtgattagtaaaagtacattctgcctgcatttgtttgcacaaggcttttgccagatcgatatcaaagccgacaatctcattattagcacctatagattcaaagggtggataggtggctgaaacgccaaaattgattttctctgcggcagaagcaccgaaagtaaaggaagcaagtaaagcggcaagaactaactttttcatgatggaactcccgtctgtcaatcttatgatttttggccgtgtctgcggcatgggataacaatgccatcaagtgaatttatatgcaataaatatgattaaataatttaaatgaaataaaaaaaagacggataacttagtgagttgtccgtcttcattataagaatttatgcactatgtaggccggataaggcgtccacgccgcatccggcacaggcaccgtgctgatgtctgatgcgacgctggcgcgtcttatcagacctacaaacccccccggcgaatgtacgcagctacattaattccgccgttcgaatgccagtgctttgcgctcgatcagacgcatcatcagcgtcagcaggccgttgacgaccaggtaaataatccctgccgcaccgaacaccattacatcgtaggtgcgtccgtacaacaactggctgtatcccatcacttccatcagcgtaatggtgtaagccagagaggtacttttgaacaccagcaccacttcgttggaataagaagagagcgagcgtttaaaggcatacggcagcaggagcgccagcgtatcttttttgctcattcccagggcgctacaggactgccactgaccttctgggatcgcacgaattgcaccgtaaaacagctgcgtggtatacgccgcactgttcagcgataacgcaatcagcgcacataaccacggttctgacaacaaatgccacagtgccggatactcctgcaacgtcggaaactggcccggcccgtaataaatcaggaagatctgcaccagcagcggcgtaccggtaaacagcgtgatataaccccgcaccagccacaccagcaccggcgttttcagcgtcaggatgatggtaaaaatcaatgccagaatcagtgccacaatcagcgaggcaacggttagcgtcaggctggtgtgtagccctttcatcagttcgggtaaatactcaaacattagctgggcctccgctcaaaacgtgtcgcgcgcaggtcaatgcgtttgagaatgtactgactgagcagggtgatcaccaggtaaatcgccgccgccacaatgtaccaggtaaatggttcctgggtacgagtagcgatgctttttgtttgcagcattaaatcattcacactaatcaaactgaccagcgcggtatctttcagcagcaccagccactggttaccgaggccaggcagcgcatgacgccacatctgcggcatcaccagacggaaaaagatagccgatttcgacagccccagcgcctgaccagactcccactgacccaccggcaccgctttcaacgcgccccgaagcgtttgcgaggcataggcggcatacagcagtgacagagcgatgacaccacaaaggaacgggctaacgtcgaagttctcaatgtccatctgcactgggatctgcacgaacccaagattgatagtgaagccatccgaaagcgtcagcagcagctgcgaggagccaaaatagataaacagcaccaccagaatttctggcaggccacgcagaatggttaccagcgctgaacctgcccacgcgacaggacgccattttgccgactcccataccgcaaagaacatcgccagcgccagcccgacaatcaatgcacaaacggcaaggccgacggtcatcccggcggcgcttgctaaaggaaaaaattcattcatcaggaattacttctggaaccatttgttgtagatggtttcgtaagtgccatctttcttcactttttccagcgcagtgttgagtttctgctgcagctcagtgttgccctgacgtaccgcgatgccgaggccagtgccgaagtaatctttatcggtcactttgtcgcccaccgccgccagtttcgggttatctttcagccactcagtgaccactgcggtgtcaccgaagacgccgtcgatacgcccgttttgcagatccagttttgcgttctggtagctgtcatacggaacggtagtgatttccgggtgcttatccataatgaatttctggtgtgtcgtcccgttctgtacgccgacttttttgcctttcagctgatcaacactggtgtatttgccttgctgacccacaaacagggcagagttgtcatagtacggggtggtaaacagcacctgcttttcacgctccggagtgatatccatgcccgccatcacggcttctacgcgacggaatttcaggcttgggatcaggctgtcaaacgcctggttagagaaagtgcaggttgcatcaatctctttacacagcgcttgtgccaggtcgacgtcaaaaccaacgatctggttgtttgcatcaatcgattcaaacggaggataggatgcttcggtagcaaaacgaatggtttcggcagctgtggcggaaagactaaaacctgcaattaacgcggcaatcagaacttttttcattgttgttatcccgaatcttagtgagagagatagtttttaaatgcttcggtttgcggctcggtaaagcagctcgcgtcgccttgttctacgatatgaccattttccatatacaccactcggctggcggttttacgcgccacttcaacttcgtgggtgacgatcacctgggtaatattcgtttctgccagctcacgaatgatgctgacgatttgtgccgtaatttccgggtccagtgcggcggtcggttcatcgaacagcagtacctgcggttccatcatcaacgcacgggcaatagcaacacgctgctgctgaccaccagaaagatgcagcgggtaacgatcgctataaggtttgagacgcagacgttccagcagtttttctgcacgggccagcgcctgatctttactcaaccccagtacacggcagggcgcttcaatcaggttttgctgcacggtcagatgcggccacaggttgtattgctgaaacaccatgccaacgttacgacgcaaatcgcgaatcgctttgtcagagggtgttttggtgaaatcgaaatggttgcctgcaatgttgagcgtaccggagcgtggcatctcaagcagattgagtacacgcagcagcgagcttttacccgcgccgctggggccaagtaacaccagcgtttcgccctgtgggcaatccagcgtgatatcgaacagcgcctgatgcgcgccgtagaagcaattaatgccgtttaattgaatactcattgacactcgtatactggcagtctgatagctattgaggtcgaagatagtacctttgacagaataattatgcaatatttctgctttaaaagttaaaagcaaagcgcattattcaataaacatagcacaaaataacgggggcggtggtcggcgagcataaatgtcggcattcctcacgaaatgccggacaatttacggggtttattggttgatcaaggcgttagcgattctcgatggactgacggagcgtacccgccgtggcatgaacgctgccgcctaagtagcgcacatcgtcgatgacccaacactggccttcctgaatcattaacacttcatcctgccaaccctggtcaccctgtttgagatctacgcgcaatggaatgttacgggcatcacgattagggatagtcgatgcactggcaacgtgggcgctatctggcaaggtggttcgactggagaacggatcgctgcttaacaattcacgatgactattatcgcggctggcatcgctaagaagggttgccagtttgtcactcaaataggggcgcagggcggtaatgtcattgctgcgatgttgaatgcggtagtcatagaattgttgagccacgctgtcaggccccccctggacacaggaaccggtgcggggaccgttatctttataagctggcgtgacggtggtacaggcactcagcagcagtgcacatggaataagtagagatagtgaacggtagcgcataatcatttccttattagcttgctgtctgcgtcacactacgaccaaacgctatcagattatttaatacattgtttttaatacaattctgaaacaatctgaacacctgattgggtttgagtccattgctggctatccactcaaggttgctcgtagctgacttacttaaattacccaaacaatagacagtgtaaaccatttgtgaggttgagcgtgttatatggctgaaatgatcatttaaggtaaatatgatagttctgaaatggtggtataaatcctcctgtagaggttaagagcatctgcaagaagccagtttcacatttataacgcgtgataaatgaacgcggttattgtctaatcattacaaaatttttcacatgcgataagagatcctgcgattaagatgattgccaaaattacgttgtatttttgaaaatgagcgaaatttgatagtcccagctttgactctcgataatattatttatgctacaattgtgggtaaagaatttaagctaatgaattttagcgaagaataaattaagttgtttcagtatctcgttaattaatatgaatataaaaggcgttgtgcttttataattataaagcacgaggagttcggtggattatcgtttttcttgggtgatttttaatatgataaacaatatatctgatcaagcatcatcatttccaggcacacaactaaatcaaagtgataatttcctggattcactgagggaatttttcgcgatattaaattccagtcgtaagggtgagttgtctacatgggataccatctacttgcatctgatattagcaataaatgctgacagtgatctcataaaaaatgatgtgttgctcgcggaaaatatgccatcagcgaattaccaatttaatactttttttagtaatgctttcgagactgatgttaaaaaatatctgggtaaatcagaagataacgaagttgaaataaaggcgggtaatgaaagaatctctattggaatacgtaatgtatcgaatgggaaacttgaaagacaacagtttcttttccctctggactatgagaataaattacaagatcaattagacaagcattttacgattgaatcgcacccattattatacaggcataccattggtagtaaaattgcgaatgtgatttttgaaaaattatacagccgtattgactttaacaaagaacaatatatatcctttataaagggcgcgtttattcatttttatgattatagcaggcgatatgcaattagtgagaatatcgaaaaagacgctgtaacaaataatatcgcattgatgaacactttttatgacagtgataatacgtcaggtgaggttttaaataatgattttacagaagaagagccatttgaaactgcgttagatgtagagcatacaatagtgcttggatttgctgatgataattttgaaacaaaacctgttcattatcaggatttattaacacgatttagtgcctttcaagataccgtgtttaatctgtttcctgaaatgcgctcttcgcattaccacgatatttgtagcgtatgtgtggatatgacaaagggaacgcaatgcatgattcacttgatggtgaatgaagaagttttcatgtctctgcctgttccagttgccacgatggtacgtgaagatgcaagtaatttagtcaatcttaaaacactactcaatgatggttttttcattaaatatagtcattttaatgacgtggcattaataaagcaaaacataagtaatctctacttatcacacactgttgtgaatgaaagcatattgaaaaaatgttgttttgaaaacggcagtttaggtgatgttaaaataacaaatagcaatataataaataatgtattcaaaaatgtttcgtttagatctgttaaaattaacaacgtaaatactcattctttaaaatttattaattgccatttttttaatgttgatatgataagagttaatttcagcaaatgtctttttcatgactgtagtatgcatggtgtcaagataaaaccatggttgccagtaaaatggacaaaagagttaataaatgattatttgtatggctgtttactatctctgtactctatctgtgcaagggatatatataatatgagcgccgggaataacgtgaaggttgctgcggatgctttccttgaaattattttctctcttaagaataaatattgcattaaactattaagcgctcaggaacgggcgtttatttacgaatttgcaagaatgatcttcgcttatattaatgacaaaagcattgagatcttattactttcttgttttgcggcgtctgaccaaaaagcaatccagaggtatatacctcagtcacaagatggggaagactttaggagtcatttacaatataagttgcctctttccgctcattaatgttgttggtgcaacataataagacaggtaagcggtaccctataatgaaaccaatatcgggttatgcaacggataatcgtaaagacttaagtgggtgtttttgacacaatgagatgatttcctaaactgatcaaaaccttcttcccaacatggcatatcagttcgataatgctttagagatcgaaggcttaacaaacaaggagatcgatcatgcaattttctacaaccccaactctggaaggccagaccatcgttgaatattgcggtgtggtgaccggcgaagcgattttaggtgccaatattttccgtgatttctttgccggtatccgcgatatcgttggcggacgttccggtgcgtatgaaaaagaactgcgtaaagcacgggagatcgcctttgaggaattaggctcccaggcgcgggcgctgggggccgatgccgtcgtcggtattgatatcgactacgaaacggtcgggcaaaacggcagtatgctgatggttagcgtcagcggtacggcggtgaaaacgcgtcgatgagaagagtcttctggctggtcgctgccgctctgttattggcagggtgtgcaggcgaaaaaggcattgtcgagaaagagggatatcagcttgatacccgacgccaggcgcaggcggcgtatccgcgcattaaagtgctggtgatccactacaccgcagatgattttgatagctcgctggcgacactgaccgataagcaggtcagctcgcattatctggtccctgcggtaccaccgcgatacaacggtaaaccgcgcatctggcaactggtgccggaacaagaactggcctggcatgcggggattagcgcctggcgcggggcaacgcgccttaacgacacctctattggcattgagctggaaaaccgtggctggcaaaaatcggccggagtgaaatattttgccccgtttgaaccgacacagattcaggcgcttattccactggcgaaagatattattgcccgttatcacatcaagccggaaaacgtagtggcacatgcggatatcgcaccgcagcgcaaagacgatccggggccattatttccctggcagcaactggcgcagcaggggattggtgcctggccggatgcgcagcgggttaacttttaccttgccgggcgcgcgccgcacacaccggtagataccgcgtcattgctggagcttttggcgcgctacggttatgacgttaaacctgatatgacaccgcgcgagcagcggcgcgtgattatggcattccagatgcatttccgcccgacgttatataacggcgaagcggatgcagaaactcaggcgattgccgaagcattgctggagaaatacgggcaggattagcgcggcagttttccgtggtcgcgtagccaggcggcagttttctcgataccttcatctagggtgatgatcggctgataacctaactcttcctgcgcacgcgtaatatccagcgtaaagtcaaaattcaacttggagacgccgtagtgggtcagcggcggctcttttgctgacttgcggcctaaacgctccatgctgcgggcgatcatatccagcatcgggtaggggacggaacgaatacgacagtcaatattcaactcgtcgatcagcttctgcacgatgctgcgcagtgtgcgatgctcgccgttggtgatattgtacacacgcccggaaggtagcttatcgcaggcttcctggcttgccagccacattgcgtgcacggtattttcatagtaggtcatatcgaccagcgcactgccgccatgcggtaacagaatactgccgtagtggtgcatcatatgcgccagacggggaataaagactttatcgtgcggtccgaacagactttgtgggcgcagaatagtaaagcgcgtttgtggattcgcctgcgaaagcatattgatcacttcttcgctggctgctttgctgcgggcaaactcgttggcgaagcggtgagggcgaaaatcttctttaatatcgcgatggtggtgataatcgaagtacagggagggggaagagatatgaataaagttacgcacaccccaggcgacagcccattcacccaggcggcgagtggcgcgaacgttagccagatcgaaagcctgttgtgtcccccagggtgaggtaaagctggagcagtgccacagcgtatcaatgcccgcgagcatcactttagcttgtgatgaaaccagctcggtcagatccgccggaacaaactctgcgcccattttttccagcaatttgcccattgcctcgttgcgaccggtcgctcgcacgctgatgcctttctggcataaaaactctaccgcgtttcgacctaagccgctggtggcgccggtaaccagtaccttcatatcaatccactgttgttgagaaaatgacgtgcgcattcttccgtgatttcccccatgatgcaatgggaaacatgaaagaataacgcaggttttgtcgattaatctgtgctttgttctgccagtctggcgatttgttttgccattccgcgaaaaataaacagatgcgcggggatcatcaataaccagtaaaacagccccggcataccgtgcggatgccagaaagcgcggacatcgatagtacgatagtcgcctttatcttccaggctaaaacacagtcgtcccagccccgacgctttcatgccaaataacaacgtaagttgtttttccggttcaacgacaatcactttccagctatccaccgcatcgccagtctgtaaatattcgcgctccgggcggcctttcgccagcttatgaccgatcgcgcggtccatcaacgcccgtgtctgccacaaaatattgccaaagaaataacgctctttaccgccgatttggttcactacctgccataaagcagcaaggctggcggacgttttaacggtaaaccccgcctgtttggcaaaataaccgtactccggtcgccagcgggcaaaggcctgagcgtcgtagccccagtcgctggagttgaccagtttttcctcctctttcaacgtgctacgtaccgcgtcatcgaaagcgatcagccgttgtgggatgagtgcacgtagcgcggtatcatccgccagcagatcgtgtttcagcccctgaatcaacgccctggcggtggtgggcggtacggaagtaatcacattgagaaaccacaccgaaatccagcgggtggggagggggatggggatcaaccagcggcgcttaccgctcaccgccataaaatgttcaaactgttgctgataactgagcacctctggtccggcggcttcgaagatgcggtgttcgctggccggatgatctaacaacgccaccagatagtgcagcaagttttccagcgcgatgggcgtggtgcgtgaacgtacccagcgtggcggcgttaacactggcaggttgtagaccatatcgcgcatgacttcgaacgccgctgaacctgcgccaacgataattccggcccgaagttcggtcacaggtacattcgcttcacgaagaatgtccgccgtagcctgacgagcacgcagatgatccgactgctcatgtggcggggcctgcaacgaactgagaaagattaattgcttaactggtacttcacgtagcgcatcgcggacgttgagagccacctggcgctcctgagcgataaaatcgccgccttcgcccatgctgtgcaccagaaaatagacggtatcgatatcctgcaacagggccggaaggttatccggccagctgagatcgactttatggcaactgacgtttgccagttgcagctttgcaagcctgtcgacatgacgtgccgccgccaggatctgatgcccttgctggctgagtgtgcgcaccagatgctgaccaatgtagccactggcaccgagaactaaaatgcgttgcggcacgtctctctccttaacgcgccaggaatgcgcgccagtgggcggcgacttccgccagttgttcgcgcgagacgtcaagatgcgtcaccaggcggacaatcggcgaggcgttaatcagcacgtttctcgctttcatgtattcgcctaacgcggcagcattttcttccccgacgcgaacaaacagcatattagtgtcctgacgcatcacatccgcgcctgcttcacgcagttgctccgccatccaggcggcgttgtcgtgatcttcctgcaaccgtgcgacgttatttttcagggcatacatcccggcggcagccagaatcccggactgacgcatcccgccaccggccattttccgccagcggatggcacgtttaatgtaatcacgattaccgacgagtaatgaaccgactggcgtcccaagacctttcgacaggcaaatggtgaacgaatcacaatattgcgtgatctctttcagttcgcagccgtaagccaccacggcattaaagatgcgcgcaccgtcaacatgcagcgccagattgcgcttgcgggtaaattcccatgcttctttcaggtattcacgcggcagcactttgccgttgtgggtgttttctagactgagtaatttggtgcgggcgaaatggatatcgtcgggtttgattttcatcgccactttatccagcggtagcgtgccgtcggcagccgcgtcgatgggttgcggttgaatactgcccagcaccgctgcgccaccggcttcaaacagataattatgcgcggcctgaccgacaatatactcttcgccgcgttcgcagtgactgagcagagcgaccaggttagcctgggtgccggtcggcagaaaaatggcggcttctttaccggaaagctctgcggcgtagtcctgcagagcattaacggtagggtcgtctccgtaaacgtcgtccccaaccggggcggccatcattgcttcgagcatggcgcggctcggtcgggtaacggtatcactgcgtaaatcaatcatggcatgtccttattatgacgggaaatgccaccctttttaccttagccagttcgttttcgccagttcgatcacttcatcgccgcgtccgctgatgattgcgcgcaacatatacaagctaaatcctttggcctgttcgagtttgatctgcggtggaatggctaactcttctttggcgaccaccacatccaccagcaccggaccgtcgatggagaaggcgcgttgcagggcttcatcaacttcagacgctttttctacacggatacccgtaatgccgcacgcttcggcaatgcgggcaaagtttgtgtcgtgtagttcggtgccgtcagtcaaatagccaccagctttcatctccatcgccacaaagcccagcacgctgttgttaaagacgacaattttcactggcagtttcatctgcactactgagaggaaatcgcccatcaacatgctaaaaccgccatcgccgcacatggcgaccacctgacgttctggctctgtcgcctgcgcacccagcgcctgcggcatggcgttagccatcgaaccgtggttaaacgaacctaacaggcgacgcttgccgttcatttttagataacgtgccgcccacaccgttggcgtaccaacgtcacaggtgaaaatagcgtcatcggcggcaaaatgactaatttgctgcgccagatattgcgggtgaatggctttctcgctcggtttagctaaatcgtccagccctttgcgggcgtcgcggtaatcttccagcgctttatccagaaacttgcgatcggctttttcttccaccaatggaagcaatgcacgcagagtcgacttgatatcgccgaccagtgccatatccaccttgctgtgagcgccgatgctggctgggttgatatcaatctgaatgattttggcatcggtcgggtagaaggcgcggtagggaaattgcgtgccgagtagcactaacgtgtcggcgttcatcatggtatggaaacctgacgagaagccgattaacccggtcattccaacatcatacggattatcgtattcgacatgttctttaccgcgcagggcatgaacaataggcgctttaattttcccggcaaactcaactaactctttatgcgcccccgcgcagccgctgccacacatcagggcgatattgctggaataacgcagcagttgcgccagtttgcgtaactcttcttcttccggcgtcacgactggttgtggcgcatgataccagtgcgtggttgccccttctggcgcaggttttaacgccacgtcgcctggtaacacgacaaccgaaacgccacggttaagcaccgctttgcgcatggcaatcgccagtacttgtgggatctgctccgggctggaaaccagctcgcaatagtgactacattcgcggaatagctcttgtgggtgggtttcctggaaatagccgctgccaatttcgctggagggaatatgagcggcaatcgccagtaccggaacgtgattgcggtggcaatcgaacaggccgttgattaagtgcaggttgccggggccgcacgatccggcgcagaccgccagttctccgctaagttgtgcttcagcgccagcggcaaaggccgccacttcttcgtggcgggtggacatccactcgatggtgcccatgcgattaagactgtcactaagaccgttcagagagtcgcctgtgactccccagatgcgtttcacccctgccgattcgagtgttttggcgatataagctgcaaccgtttgtttcatggttctccatctcctgaatgtgataacggtaacaagtttagttcatctgacggagggggaagggatgggagagaaaggaggcactaacggttaaatagcccgatgaaaggaatatcatcgggcataaggcgattatgcgagaaccaaatccccctgcggatggcaggagcaggccagtacgtaaccttcagcgatttcggcgtcggtcagcgtcattgtactgctcaccgtatattcaccggaaaccacttttgtcttacagcagccgcaaacacccgcacggcaggcagcgacaaccggaacgttattgctttccagcgcctccagtagcgtggtgccaaccggggcgtaaaattctcgtgccggttgcagtttggtgaatttcagaccgctggtcgccgcttctgctactggggtgaagaatttctctttaaagaaacgcgtcacgccgagcgctttcacttcctgctctacccaatccatatacggagccgggccgcaggtcatcacggtacgtgaagctaagtcaggtacacctgccagcagttcgcgagtgagacgaccagcgataaagccttcggtaacgttattttctgccaccagcgttaccggatagttacgccactcatcggcgaaaataacatcctgcggcgtacgcacgttgtagatcacccgcacatcggcctgtggacggttcttcgcaagccagcgacgcatcgacataatcggcgtgacgccgcagcctgccgccagcaacaggaatttatcttctgctttatcgtcgcaggtaaattcccccatcgcgtccgaaagccagagataatcaccgcgttttacatcgcgcgtcagccactgggagccgacaccgtcatcaatccgccgcacggtcagggtgatatattcactcacgcctggcgtggaggaaatggtgtaagcacgcagcgtttccgctgagtttcgcacgctgaccagtgcatattgcccggcgcgatatgggtagtaatcgtggcaaatcagggaaatcgtccacacatccggcgtttcttgcgtaatgtgatgaacctgcatccgccacgggcattgattcgttggcatcgtcatcgacaaactccttacgcgctcaacagttgcttcatgtcttcttcaacagtggtgatagaacgcaggccgaatttctcgttcagcaccgccagcaggtctggtgtcaggaaaccaggtgcagtcgggccggtgacgatatttttcacgcccagagaaagcagcgtcagcagaatgacgatcgctttctgttcaaaccaggagagcaccagcgacagcggcagatcgttcacaccacagcccagtttctctgccagagtgacagccagaataatcgctgagtaagcatcgttacattgacctgcatctaccagacgcggcagaccttcgatatcgccaaactcaagtttgttaaagcgatatttaccacaggcgagggtcaggatcaggcagtcatccggcacgctggtggcgaaatcggtgaagtagtggcgctcgccgcgtgcgccgtcacagccaccaagcaggaagatatgacgcagtttttcacggctcaccagatcaatcagcgtatcagcagcgccaagcagcgtctggcgaccaaaacccacggtgataaggtgcggaatttcgctgtacgggaagcctgccatctgttgcgcctgggtgataaccgcagagaaatcatcaccgtccagatgacgcacgccaggccagccaacaatgctgcgggtccagatacgatcgtcataagcgcctacggttgggtcgatgatgcagttcgaggtcatcacgatggggccagggaaacgagcgaactccacttgctgattctgccagccgctgccgtagttaccgaccagatgcttgaatttacgcagctccgggtagccatgcgcaggcagcatttcgccgtgggtgtagacattaacgcccgtgccttcggtctgttccagcaggttgtagagatctttgagatcgtgaccggaaatcagaatgcatttacccgccgtcgctttgacgttgacctgggttggcgtcgggtgaccgtatttaccggtttcgcctgcatccagaatgctcatcactttgaagttcatctggccgatttccattgaacactcaagaagcgcgttcatatcggcaggccaggtccccagccacgccatgattttatggtactgggcataaatatcgttgtcgtattgaccgagaacatgcgcgtgttccatataggccgccgcacctttcaggccatacaggcacagcagacgcaggccgagaatgttttcgccaatcgccgctttatctttgttaggggtaaattctgctgcctgacgttgcagctcgccgagatcatcgctcaccagttgcaggtcagccatcgggttatcgacgcgcgcgttggcatctacagccaggcattgtgctttcagcgcctcgcgcaaggcaatcgcttcacgagcgtagccgacaatacgcggagaatcgaagttaacgttggtcagggttgagaaaaaggcacgtggcgcgaagctgtcaacatcgtggttgatgatgccgtattcacacgcttttaccgcccaggcagaaagcccttgcagcgccgcgatgagtaaatcctgaaggtcagaagtttccgccgttttaccacacatcccctgcgcgtatgagcagccgtttcctgccggagtacggatagtttgttcacattgcacacaaaacatgatcacaccttttaaagttatatttaatatacatgtttaaggttaagacgcttaacgcggggataaaagggatttttcatgcaactttaagggagattgatttagcgcaattttggcggcagggatctaccgccagagaggtattacgcagagaaaaaggcgatgaggatcggcactaacaggctaagaataaaaccgtgaacaattgccgccgggaccatatccagcccgccagtacgttgaagaacgggcagggtgaaatccattgatgtggcaccgcataagcccagtgcagtagagcggctgcggcgaatcagcccagggatcaacataatagcaatcagttcacgggccagatcattaaaaaacgccgcgctcccgattaccggaccaaaagattcggtcaataaaataccggaaagagaataccagccgaaaccggaggccattgccagcgcggtattgatggggagatcaagaataaaggcgttaattaaaccaccaattaatgaactgacaaccaccaccacggcgacaatcattccccggcgattaaggacaatctgctttaaggtcatgccattattgcgcaactgaataccaacgaggaaaagtagcaaaattaacgtgtattcactggcttcggtcgcgtgttgtaagaaagccagtccactcagaccaatggcaaaaccaatcactactacgccgcacagttttagcgactccagcgccatcgcaatacgcgacgggagtttttcttgctgatggtggttgcgccacggcaggcctcgctccagccacatcagggcggcaatattacacagtaaaataacggtaatactgacggcagaataatgcagaatcgccaacaggttactggcgaggttatcgagaaacgccagactgatacccataaaaaagagaataaggtaaaccatccagcttaatagctgattaataacttttaacgcagcttgttggcgaagcggaatgaggtaacctacaatcaggggaaccagaatgattaacagcccagaaaacatgaaaacccagtccttgcaaagatgaagtcgaaatgcgcgatgacacactactgaaagcggaaggacgagtaaagttgcaattaaaaggaaatgttatgcataaggagcagtagagtattcgttttcatttaaagatattcttgcgctttaattacaaactgcaccgatgttggtggcgtcaaaatcgccgaggcgttccctgaaggccggggcagcccacatggatgtgggctgagggcgcgttttacagggatgttacctcgcgcccgacccggtagccgtaagggataagtcgagggcaccgcgcagcggcgattttgttcgccagagcccgggggggcagggggcggcggcgattggccgccccctgcgcgctccttgcgccagtggcaatatgtggcttagctcatgaaaggagcgcaacaagatgatgaatcaacatataacaacatcttaaaaaaaggcctgacattacgccaggccttctgcgttaattaatcacgcttttccagcagggtccggtaaatcagaccaccgataatgccgccgacaattggcaccacccagaagaaccacagttgttctaatgcccagccgccctggaagatagcaaccgcggtgctgcgcgccgggttaacagaagtgttagtcaccggaatactaattaagtgaatcagggttaaggccagaccaatagcgatcggcgcaaaacctgccggcgcgaatttgtcggttgcgccgtggatcaccaacaggaaacctgcactcaataccagttcaactaccagcgcggaggtgatgctgccaacttactgatttagtgtatgatggtgtttttgaggtgctccagtggcttctgtttctatcagctgtccctcctgttcagctactgacggggtggtgcgtaacggcaaaagcactgccggacatcagcgctatctctgctctcactgccgtaaaacatggcaactgcagttcacttacaccgcttctcaacccggtacgcaccagaaaatcattgatatggccatgaatggcgttggatgccgggcaactgcacgcattatgggcgttggcctcaacacgattttacgtcacttaaaaaactcaggccgcagtcggtaacctcgcgcatacagccgggcagtgacgtcatcgtctgcgcggaaatggacgaacagtggggctatgtcggggctaaatcgcgccagcgctggctgttttacgcgtatgacagtctccggaagacggttgttgcgcacgtattcggtgaacgcactatggcgacgctggggcgtcttatgagcctgctgtcaccctttgacgtggtgatatggatgacggatggctggccgctgtatgaatcccgcctgaagggaaagctgcacgtaatcagcaagcgatatacgcagcgaattgagcggcataacctgaatctgaggcagcacctggcacggctgggacggaagtcgctgtcgttctcaaaatcggtggagctgcatgacaaagtcatcgggcattatctgaacataaaacactatcaataagttggagtcattaccagcgggttgccccatatagtcatttgtctgattgacagtgtagtgcacgcaaaagatttaatcctttaggcgtaataaaaaataatatatcatgctaattatttgattttgttgtttttgcagacttatcagcaagagggagtataacgcgattattcgctcatttttcagacatttgccatgcttaaatgtgatgtcatcacgtattagcaaggcctttcccgttatactgccagcgtaaaggataagtcacatatttctggaggggatatgattcttgagcgcgttgaaattgtgggttttcgcggtatcaaccgtttgtcgttgatgctggaacaaaacaacgtcctgattggggagaacgcgtggggtaaatccagcttgctggacgccttaaccctgctgctatcgccagaatcagatctctaccattttgagcgcgacgatttctggttcccgccgggagatatcaacgggcgagaacatcatctgcatattattttgaccttccgcgaatcgctgccaggccgacatcgggttcgccgttatcggccgctggaagcgtgctggacgccatgcaccgatggctatcaccgtattttttatcgtctggaaggggagagtgcggaagacggcagcgtgatgacactgcgcagttttctcgataaagacggacatccgattgatgtcgaggatattaacgatcaggcacgccatctggtgcgtttaatgccggtgctgcgcttgcgtgatgcccgttttatgcgccgtattcgtaacggcacggtgccaaatgtccctaatatggaagtcaccgcgcgccagctcgatttcctcgcccgtgagttatcctcacatccgcaaaatctctctgatgggcagattcgtcagggactttccgcaatggtacagctgcttgagcattatttctctgagcagggggccggacaggcgcgatatcgtttaatgcggcggcgagccagcaatgagcaacgaagctggcgctatctggatatcatcaaccggatgattgaccgacctggtgggcgctcgtatcgggttattttgctcggcctgtttgctactttgttgcaggcaaaaggcacattgcgactggataaagacgcccgtccattgttgctgatcgaagatccagaaacccgtttacaccccattatgctttcagttgcctggcatctgttgaatcttctgccattgcagcgcattgtcaccaccaactcgggtgagttgctttcgttaacgccggtagagcatgtttgccgactggtacgtgagtcctcgcgcgttgccgcctggcgtctggggccgagtggcttgagtaccgaagatagccgacgcatatcctttcacattcgttttaaccgtccgtcatcgctgtttgcacgctgctggttgctggtggaaggggaaacggaaacctgggttatcaatgaactggcgcgtcagtgcggacatcattttgatgccgaagggatcaaggtcattgagtttgcccagtccgggctaaagccactggttaaatttgcccgccgaatggggattgaatggcatgtactggtcgatggcgatgaagcagggaagaaatatgccgctacggtacgcagcctgttgaataacgatcgggaagccgaacgagaacatttaacggcgttaccggcgctggatatggaacattttatgtatcgccagggattttccgatgtgttccaccgcgtggcgcaaatcccggaaaatgtaccgatgaatctacgcaaaattatctcgaaagcgatccatcgctcttccaaacccgatcttgccattgaagtggcaatggaggcaggacgtcgtggtgtggactccgtaccgacgctgctgaaaaaaatgttctcacgcgtgctgtggctggcgcgcggtcgcgcggattaaccgcgaaacatcgtggccatttgtggctgaatagcgtcgagcatctcatagcgccgacggtattcagcccgttttttactggcgatttcggcaatctcttttcgtgctatctgtgctggaaggcggtaatggcgttcagcatcacatacgccgccaaccgattcccagaaagcgttgtaatcagcgtggatcttgccttctttatcgcgataacgcaggctgcggtaaatatgcgtttcattgctgacggcaataatctgctctacctgcaaacgttgggcaaacagacaggccgcttccatcacgaggcgtttgggaaatagcccgtggcaggctttcgtcgcattctggatttcctgatgtggaatttcccattttgcgccttgcagtccgccaataaacatcgttcttttcccctgatattcacacagggtaaacgtgatctctgccagaggaataccttcgctgttgcgaaacaggattgtgctgtcaccttctttatccattgagatcatcatggtcagctcaagcgtgaactgctcgccgtttttgccttccagcttcgccagttgcagcccgggggtattcaaatataagctgaattcttccgccgacatacatccgcggagtaacgcataatggtaacgtaacgcctccagcaattgcttacggctaagattcgccgcaaggtaagggcgatgcagacgcacaggcagtcgcggttggcgcgttaacaacacattgagattaggccagtgggaaagttcgttcatccactcaacgcttaaacgcggcataatcaacgagcgcagcaaaaatttctggcgaaaactacggcgatgccagaatttacccggccgacactgtccacgtgccagactaagaaaaagtgacaggctgctgagagattcagatggcgtaaaggtccgttcagttagctgcgacatattcatgaaatcaatggttatacatgacgtcgatttcaccattgcgtatcttaaccaaacatcaatagtgtgattactaacgtaaattttatggttttgttgatatttcgttgaagttaatgacccggattggcatatggagtattcagaatatttatgaaaaagcggaaaaccgtgaagaagcgttacgttattgcgctggtgatagtcatcgccggactgattacgttatggagaattcttaacgcacccgtgccgacttatcagacactgattgtgcgccccggtgatttacagcaaagcgtgctggcgaccggaaagctggacgcgctgcgtaaggttgacgtgggcgcgcaggtcagcggtcagttgaaaacgctgtcggtggcgattggcgataaagtaaaaaaagaccagcttttaggggtcattgatcctgaacaggctgaaaaccagatcaaggaggtcgaagcaacgctgatggagctacgcgcgcagcggcagcaggcggaagcggagctgaaactggcgcgggtgacgtattcccgtcagcaacgtctggcacaaacgcaggcggtttcacagcaggatctcgacaccgccgcgacggagatggctgtgaaacaggcgcaaattggcaccattgacgcgcaaatcaagcgcaatcaggcttctctcgatacggctaaaaccaatctcgattacactcgcatcgttgccccgatggccggggaagtcacgcaaatcaccactctgcaaggccagacggtgattgccgcacaacaagcaccgaacattctgacgctggcagatatgagcaccatgctggtaaaagcgcaggtttctgaagcggatgtaatccacctgaagccggggcaaaaagcctggtttacggtacttggcgatccactgacgcgctacgaggggcaaatcaaggatgtactaccgacgccggaaaaggttaacgacgctattttctattacgcccgttttgaagtccccaaccccaatggtttgctgcggctggatatgactgcgcaagtgcatattcagctcaccgatgtgaaaaatgtgctgacgatccctctgtcggcgttaggcgatccggttggcgataatcgttataaagtcaaattgttgcgtaatggcgaaacacgcgagcgtgaagtgacgattggcgcacgtaacgataccgatgttgagattgtcaaagggctggaagcgggcgatgaagtggtgattggtgaggccaaaccaggagctgcacaatgacgcctttgctcgaattaaaggatattcgtcgcagctatcctgccggtaatgagcaggttgaggtgctgaagggcatcagcctcgatatttatgcgggtgagatggtcgcgattgttggcgcttcgggttccggtaaatcgaccctgatgaatattctcggctgcctggataaggccaccagcggcacctatcgcgtagccggtcaggatgttgccacgctggacgccgatgcgctggcgcaactgcgccgcgagcatttcggctttattttccagcgttaccatttgctttcgcatttaaccgccgagcagaacgttgaagtacccgccgtctatgctggtcttgagcggaaacagcgactgcttcgtgcccaggagttgctgcaacggctggggctggaagaccgtacagagtattatccggcacagctttcgggtggtcagcaacagcgcgtcagcatcgcgcgggcattgatgaacggcggtcaggtaattcttgccgatgaaccaaccggcgcactggacagccattctggcgaagaggtgatggcgatcctgcatcagctgcgcgatcgcgggcatacggtgattatcgtcacccacgatccgcaggtcgctgctcaggccgagcgggtgatcgaaattcgcgacggcgaaattgtgcgcaatcctcccgccattgaaaaagtgaatgttgctggcgggacggagcctgttgtcaatacagtgtctggctggcggcagtttgtcagcggttttaacgaggcgctgacgatggcatggcgggcgctggcagcgaataaaatgcgtactttactgaccatgctggggattattatcggtattgcgtcggtggtttccattgtcgtggtgggtgacgccgccaaacaaatggtgctggcggatattcgttctattggtacgaatactattgatgtctatcccgggaaagattttggcgatgacgatccgcaatatcagcaggcgctgaagtacgacgacttaatcgccatccaaaaacaaccgtgggtcgcctcagccacacctgccgtctcgcaaaacctgcgcctgcgttataacaatgttgatgttgctgccagtgccaatggcgtgagcggcgattattttaatgtctatggcatgaccttcagtgaaggaaacacctttaatcaggagcagctgaacggtcgtgcgcaggtcgtggttctcgacagtaatactcgccgccagcttttcccccataaagcagatgtggttggcgaggtgattctggtcggcaatatgcccgccagagtcattggtgtggcggaagaaaaacagtcgatgtttggtagcagtaaagtgctgcgtgtctggctaccttacagcacgatgtccgggcgagttatgggccagtcgtggcttaactccattactgtcagggtgaaagaaggatttgacagcgccgaggcggaacagcaactcacgcgtttactttcactgcgccacggtaagaaggatttctttacctggaacatggacggcgtcttgaaaactgttgaaaagaccacacgtactttacaactgtttctgacgctggtggcggtgatttcgctggtggtgggtggtattggtgtaatgaatattatgctggtgtcagtgaccgagcggacgcgggaaattggcattcgcatggctgtaggtgcgcgagcaagcgatgttttgcaacagttcctgatcgaagccgtactggtttgcctggtcggtggcgcgttgggaataactctgtcactgttaattgctttcaccttgcagcttttcttacccggctgggagattggtttttcaccgttggcactgctgctggcgtttctctgctcgacggccaccgggattttatttggatggttacccgcacgaaatgcggcacgactggatccagtagatgctctggcacgagagtaatttttgagataaaaatgccagccgatcgggctggcattttgcctttaggatgtacacaatgagacagaagagctatgcgactgccgcttctacttcgacgggcacaataacactggcgtgattgccttttggcccctggtggacatcaaactgaacggattgtccagcttttagcgttctataaccatccatctgaatggtggaataatgagcgaaaatatcttcgccgccgccttcagggcagatgaaaccaaaccctttggcattgttgaaccacttaacagtacccttttccatgcttcgacatccttcgcaaatcttatacaagtaagatggaataaaccggggtcagagagggggctgttcaaaacctcgccaactctagaaatacaatttagagaattagggcgagccgtcaagcatttgacaggggccagggggcaggtatgaatcaaaaatttgaagcagttaacgctattgacaggaatgtgacagatgtcgctgatgccaacgatagatgatagttatctatcatgtggagtagattggtcaggcaaataagctcttgtcagcggcagggcgttctgccgataaccgtaaccgaagatgataactgacaatgggtaaaacgaacgactggctggactttgatcaactggcggaagaaaaagttcgcgacgcgctaaaaccgccatctatgtataaagtgatattagtcaatgatgattacactccgatggagtttgttattgacgtgttacaaaaattcttttcttatgatgtagaacgtgcaacgcaattgatgctcgctgttcactaccaggggaaggccatttgcggagtctttaccgccgaggttgcagaaaccaaagtggcgatggtgaacaagtacgcgagggagaatgagcatccattgctgtgtacgctagaaaaagcctgaatgcaggcataaaaattgggggaggtgcctatgctcaatcaagaactggaactcagtttaaatatggctttcgccagagcgcgcgagcaccgtcatgagtttatgaccgtcgagcacttgttactggcgctgctcagtaacccatctgcccgggaggcgctggaagcgtgttctgtggatttggttgcgctccgtcaggaactggaagcctttattgaacaaaccacacccgttctgcctgccagtgaagaggagcgcgacacacagccgacgctgagttttcagcgtgtactgcaacgtgcggtcttccatgtccagtcctccggtcgcaatgaggttaccggtgcaaacgttctggtcgctatctttagcgaacaggagtcgcaggcggcatatctgttgcgtaaacatgaagtcagccgtctcgatgtggtgaattttatctctcatggcacgcgtaaagacgagccgacacagtcttctgatcctggcagccagccaaacagcgaagaacaagctggtggggaggaacgtatggagaatttcacgacgaacctgaatcagcttgcgcgcgtgggcggaatcgacccactgattggtcgtgagaaggagctggagcgtgctattcaggttctctgccgtcgccgtaaaaacaacccgctgctggtgggggaatctggtgtcggtaaaaccgcgattgcggaaggtcttgcctggcgaattgttcagggcgatgtgccggaagtgatggctgactgtacgatttactctctcgatatcggttctctgttagcgggcacaaaatatcgcggcgactttgaaaaacgttttaaagcgttgctcaagcagctggagcaggacactaacagcatcctgtttattgatgagatccacaccattatcggtgcgggggcagcgtctggtggtcaggttgatgcggctaacctaatcaaaccgttgctctccagcggtaaaattcgtgtaattggttcgacaacctatcaggagttcagcaacattttcgagaaagaccgtgctctggcgcgtcgcttccagaaaattgatattactgaaccgtcaatcgaagaaactgttcaaatcatcaatggcctgaaaccgaagtatgaagcgcaccacgacgtgcgttataccgcaaaagcggtgcgtgcggcggtagagctggcggtgaaatacatcaatgatcgtcatctgccggataaagcgattgatgttatcgacgaagcgggcgctcgcgcacgcctgatgccggtaagcaaacgcaagaaaaccgttaatgtggcggatattgagtccgtggtggcccgtattgcacgcattccagagaagagtgtttctcagagtgaccgcgataccctgaaaaacctcggcgatcgcctgaaaatgctggtcttcggtcaggataaagccattgaggcgctgactgaagccattaagatggcgcgtgcaggtttaggtcacgaacataaaccggtcggttcgttcctgtttgccggtcctaccggggtcgggaaaacagaggtgacggtacagctttcgaaagcgttgggcattgagcttctgcgctttgatatgtccgagtatatggaacgccataccgtcagccgtctgattggtgcgcctccgggatacgttggttttgatcagggcggtttgctgaccgatgcggtaatcaagcatccacatgcggtgctgctgctggacgaaatcgagaaagcgcatccggacgtgttcaatattctgttgcaggtgatggacaacggtacgctgaccgataacaacggacgcaaagcggacttccgtaacgtggtgctggtgatgaccaccaacgccggggtacgggaaactgagcgcaaatccattggtcttatccaccaggataacagcaccgatgcgatggaagagatcaagaagatctttacaccggaattccgtaaccgtctcgacaacattatctggtttgatcatctgtcaaccgacgtgatccatcaggtggtggataaattcatcgtcgagttgcaggttcagctggatcagaaaggtgtttctctggaagtgagccaggaagcgcgtaactggctggccgagaaaggttacgaccgggcaatgggcgctcgtccgatggcgcgtgtcatccaggacaacctgaaaaaaccgctcgccaacgaactgctgtttggttcgctggtggacggcggtcaggtcaccgtcgcgctggataaagagaaaaatgagctgacttacggattccagagtgcacaaaagcacaaggcggaagcagcgcattaatctaattgttaggtaggttggtgaagtccgtaatctcgaaagaggttacggactttttgtttatggggtggaacggtgaaaaccctatttttggaggtgaaggtaatttgttgataattagtgctgctggaaaaggtaaggataaaaaagggtgacagcaggaaaatgagatggttttgctttattaacaacggactaaacgtgtagtatttgagttcactgccgtacaggcagcttagaaatcgacggggtgcggtaaaacctttgcgaacgcgttcactgccgtacaggcagcttagaaattcacaggtaacatactccacccgcccaccatgttcactgccgtacagaaagataaaatgcgaaaaaaaagctcgcactttcgtacgagctcttctttaaatatggcggtgagggggggattcgaacccccgatacgttgccgtatacacactttccaggcgtgctccttcagccactcggacacctcaccaaattgttttgctaccaaacctcatgggtggcaacggggcgctactatagggagttggagtaaaacggtcaagaagaattttaatgataattattgtttgctcatactgtaaacaagttgtgcagtatatctatatcgagacaagttatggacttatacttccaaagtacttcatacatatcacaaaataaaaaggccggttaaaccgaccttttactcgttctttctcttcgcccatcaggcggtaaaacaatcagcgactacggaagacaatgcggcctttgctcaggtcgtacggggtcagttcaacagtcactttgtcgcccgtcaggatgcggatgtagtttttgcgcattttaccggagatgtgtgcagtaaccacgtgaccgttttctaactctacgcggaacatggtattaggcaacgtttcaagaacggtaccttgcatttcaatattgtcttctttggccatctaatcctctggggtatcactaccgtaatttgaaccggcaagataatgccgaagttctgtaaataagtaaagatttgcgcgctaaatcgcaacaaacaggttcggcacattactccgaaaacacacggctaagccgcaccaaaagcgcaacgtataagggagcggtgagataaacgatgggcgttacctgacgcgaaaaattccttatcggcagcggggtaatgagcataaccaactctgcgaccgcaattataacactctggggagaaatgtgccgaaaacattcatttttgtggtgaaaacaagcatcgtggcacccagaaattattcggcaatcgtccgaggcgcatttgattgagataattcagataatcccgacggggaatttcgcaggcaccaagcgatgctgtgtgatcgttaaggacctggcagtcgataagcttaccgccatgactgataaattcctcacagaataccagaagcgccgttttagacgcattttccatccggctgaacatggactcgccacaaaatagcgttccctgggccacgccgtacataccgccgacaagctcatcttcatgccagacttcaatggagtgggcatgaccgagttcgtgaaggcgatggtaggcttcgaccacgccacgcgtgatccaggttccttcttcgcgatcgctggcacaaccttcaatgacctgaccaaaagcgtaattcatcgtgacacgatagggcgagcgtttatgaaatcgcttcatactacggctgatatgcagtgattcaggccaaagcaccgcgcgaggatcgggcgaccaccagaggatgggggcgcctggagaaaaccacggaaaaataccacgctggtaagccattaacaggcgcgcagggctaagatcgccccccagagccagcaggccgttaggctcacgtaatgcgccttccggggaagggaaggctattgaatggcgagaaagctgaaccaggcgcatgaccgcaaaactccacgcaagtcggatcgttcaataatagcttacaaaccctgcttaaactggtaataacgcccctgtctggcaagcagttctgcgtgagtaccttgctcaataatttgcccgttgtccatcactattatttgttggaaacgagagagtccgcgaagtcgatgggtgaccattaacaccgttttctcacgcatcatttctgcaagcaattcaaggatctggctttcggttgtggcatctaagccttcggtaggttcatccagcaacaccagtggcgcatcatgtaacagcgcacgggcgatagccagacggcgcagttcaccaccggagagctggcgtccgccttcacctaaccaactgttgagacctgcgtcctcgagcagcttctccagaccaacgcgacgcaagatctccgacagagcctcatcactactgccaggcgaggcgagtaacagattatcacgcagcgtggcgctaaacagatgcactcgctgaggaacaacgctgatggtctgtcgtagagccgcttcattcaggctggctatggggctatcgttaagcaaaatctcgccctgttgcgggtcccaagcgcgggtcagcagttgtaacagtgttgatttgccgcatccggttcgcccgagaatcgcaatatgttccccggcgtttacctgaagagaaatccctttaagtgcctgttgggattgctccggataagtgaactgaacatcccgtaatgtcagcgaaacgcgatcggcaacacgagtttgggtatcagggaaggtgacttccggtttttgatccgttaaatcagtgatccgaacggcagaggcaatgacttgccccagatgctgaaatgcacccgttactggtgccagtgcttcaaacgcggctaacgcgcagaagacaaacagggcaattaacgcgccgggttgagcattgccgccaacgccgccagacgccatccacagcatcaggatcaccgctaacgcgccaatgagcagcattatcgcttgcgacaatgcggtcagttcagattgacggcgttgcgcttccagccattgaatttctgtattctctagttgcgtgcgataacgatcgctggcaccaaaaatggtcagctcagcttgcccttgcagccaggccgtcagttgttggcgatactgtccgcgaagatgagtcagattttgcccggtgctttttcccgcacgataaaacagcggtggcatcaggaaaagcgtcagtaacataatgccgcccagcgtaaaggcgagggtgaaatcaaggaaacttaacccgactgtcaccaccataatcaccacaaaagcgcccaccagcggcgagataacgcgcaggtaaagatgatcgagcgtatcaacatccgccaccacgcgattgagcaattcgccctgacgatagcgcgccagtccggcaggggagaggggcaacaatttgctgaaggtgtaaatgcgcagatgctgcaacacgcggaaagtcgcgtcgtgacttaccagacgttcaaaataacgcccggcagtacgggtgattgcggcaccacgcacgcccgcagcgggtagcatatagttgaagctgtacagtccggcaacccccgcaaccgctgaggccgagaggaaccagccggaaagtgtcaacagaccgatactggcgagcagcgtcacaattgccagcacaataccaagacttaacatccatttatgacgtttatacagtgccagatagggtagcaaagcgcgcatttaaatctcctcctgacgatgggccagtaatgtggcgaatgggccaccagccacacttaattccgcgtaacgtccttgctcaataatctgaccatcctgcattacccaaatgacatcccagtcagcaagatcttctaactggtgggtgaccattaacgttgtctggcgcagagaggcggcattcagcgcctccattacgcgctgttcactgtgagcatcaaggctggcagcgggttcatccaacagtaatagcgaacagggatttagtaacgcacgggccaccgccacgcgctgcgcctgccccacggaaaggcgggcagcctggtcgccaacaggcgtatcaacgccttgtggcaggagcggtagaaactcgctgacccaggcgttatccagcgctgcttgtaattcatgttcgctggcatcaggtcgcgccagtagtacgttatcccgtaatgttgctgccggtaattgtggattttgcccaacccaggagagatgtttacgccatgattctggtgataaatcgcgtaattctatcccgttgattcgtagcgatccctgatatgagagaaaaccagaaagcgcgttcaacagtgaacttttacctgaaccgctgcgaccaaccaacacggcacgttggcctgctggcaaagtaaagttcagcggtccggccagcgttttaccttccggcgacgtgataaacagatcctcggcctcaatggtcaccggatcggtcgatgctaattccacctcgccacgctgcggatgggcgagcggggtttccataaacgttttcagactgtcagctgcaccaacagcctgggctttagcatgataaaacgtaccgagatcgcgtaatggctggaaaaactctggcgcaaggatcagggccagaaaacccgcagccagcgtcacgccagtatcgtagtgaccaaaatccagctcgccgagataggaaaaaccaaagtagaccgccaccagagcaattgacagcgaggtaaaaaattcgagaatgccggaggataaaaatgccagccgtagcacttccattgtccgttggcggaaatcttccgaagcagaacgaatactttcaatttcagcttcaccacgaccaaaaatacgcaatgtttccatgccgcgcaggcgatcgaggaaatgcccacttaagcgagcaagagcgagaaagttacgtcggttagcatcggcagcccccattccaaccagcgccataaacaacggaattaacggtgcagtgcccagcagaatgagcgccgcagcccagtttgaggggaagattgccaccacaatcagcaacggcaccgacactgccagcgccatttgcggcaggtagcgtgcatagtaatcatgcatatcgtcaatttgctcgagtaccagcgtcgcccagctccccgcaggtttaccctgaatccacgctggccctgcttgttgcagacggtcgagaacctgacggcggatggcaaagcggatatgctgcccggcgtgataacccacccgttcgcgtaaccagaccgcccatgcgcgcagtacaaaggtcagaaccagtaacgtaaagggaagcagcagggcttcacggggaatattctccataatcatatgttgcagaattcgcgccatgaaccaggcctgggcaatgatcaatatgccgcttacaaagcccagcagacgagaaatattcagccaacgttgggagatgacgctttgctgttttaaccagcgggttaactctttttgacgagatttattcattgcacgcttagcaggtgagttatcagaattatttgcagagcaatgttacaacggggaaaaaataaaggcgacccatagtcgcaaggtgtcgccttctttacttttgttactgatttgtaaaattattttgcgtcagctaaaccatcgaggtagcgttccgcatcaagtgctgccatgcagccagtaccggccgaagtaatggcctggcgataaatgtgatccatcacgtcgcctgcggcaaagacgccaggaatgctggtctgggtggcattaccatgaatacccgactgtactttgatgtagccgttttccagttccagctgcccttcgaaaatcgcagtattcgggctgtgaccgatagcaacaaacagaccggcaacgtcgagtgactcgatgttatcgctgttttgcgtatcgcgcagacgaacgccagtgacacccatttgatcgccggtcacttcttccagcgtacggttggtgtgcagaatgatgttgccgttctccactttatccatcagacgcttaataaggattttttccgcgcggaaaccgtcacggcggtgaatcagatgcacttccgaagcgatgttagacagatacagcgcctcttcaaccgcggtattgccgccgccgatgaccgcaactttctggttgcgatagaagaaaccgtcgcaggttgcacaagcagaaaccccacggcctttaaaggcttcttcagagggcaggccgagatagcgtgcagaagctccggtggcaataatcagcgcgtcgcaagtgtattcgccgttatcgccattcagacggaacggacggttttgcagatccaccttgttgatatgatcaaaaatgatctcagtttcaaacttggtggcatgttcgtgcatgcgctccattaataacggaccggtcagatcgtttggatcaccaggccagttttccacttccgtggtggtggtcagttggccgcctttttccatgccggtaatcagcacaggttgcaggttggcgcgcgccgcgtagacagcagcggtgtatcccgccgggcctgaacccaggataagcagtttactgtgtttggtcgtgcccatgagatccccatagttgttggcagacaatgggcaggattgtagggaatttacagacgtaaaaaaagagtatgacgattttgttaacaatttgtgcaatcggcagcatcgataagcaggtcaaattctcccgtcattatcacctctgctacttaaatttcccgctttataagccgattaaatgatgaataaacgcccctgttaatgaatatctggcatgttgtactaaaaatcgatgttttgctttgacaatcccctggtgttttgcgaaaacattcgaggaagaaaaaaaacagtattcttatatgcgcataaccatgcatgtaaataccatgtttaccgtgctagtgaaatctacgtatggcgtggacagacgccattcgtgatgtcgatagctgccacaaggcaacggtcttctcaccgtagacccaggcattgcgcgccgtgaatcttcatgatttcggtctatcgtgacgggtagcgactctgaacagtgatgtttcaggggcagacaggagtagggaaggaatacagagagacaataataatggtagatagcaagaagcgccttggcaaagatctcgaccgtatcgatcgtaacattcttaatgagttgcaaaaggatgggcgtatttctaacgtcgagctttctaaacgtgtgggactttccccaacgccgtgccttgagcgtgtgcgtcggctggaaagacaagggtttattcagggctatacggcgctgcttaacccccattatctggatgcatcacttctggtattcgttgagattactctgaatcgtggcgcaccggatgtgtttgaacaattcaataccgctgtacaaaaacttgaagaaattcaggagtgtcatttagtatctggtgatttcgactacctgttgaaaacacgcgtgccggatatgtcagcttaccgtaagttgctgggggaaaccctgctgcgtctgcctggcgtcaatgacacacggacatacgttgttatggaagaagtcaagcagagtaatcgtctggttattaagacgcgctaacacggaacaggtgcaaaatcggcgtattttgattacactcctgttaatccatacagcaacagtactggggtaacctggtactgttgtccgttttagcatcgggcaggaaaagcctgtaacctggagagcctttcttgagccaggaatacactgaagacaaagaagtcacattgacaaagttaagtagcggccgccgccttctggaggcgttgctgatccttattgtcctgtttgccgtctggttgatggctgccttactaagctttaacccttcggaccccagctggtcgcaaacggcctggcatgaacctatccataatttaggtgggatgcccggtgcgtggttggcagatacgctgttctttatttttggcgtgatggcttacaccattcccgtcattattgtcggcggttgttggtttgcctggcgtcatcagtccagcgacgaatacattgattattttgccgtttcgctacgcatcattggcgttttggcgctcatccttacctcctgtggtctggcggcaatcaacgctgacgatatctggtattttgcctccggtggcgtcattggcagcttactaagcactacgctacaaccactgctacacagtagcgggggaactattgcgctgctctgcgtttgggcagcgggcctgacgttgttcaccggttggtcatgggtgaccattgctgaaaaactcggcggctggattttaaacattctcaccttcgccagtaatcgtacccgtcgcgatgatacctgggtcgatgaagatgagtatgaagacgacgaagagtatgaagatgaaaatcacggcaaacagcatgaatcacgccgtgcccgtattcttcgcggcgcgctagcgcgtcgtaaacggttggcggaaaaattcattaatccgatggggcggcaaacagacgctgcgttgttctccggtaagcggatggatgatgacgaagagattacctacactgcacgcggtgtggctgccgaccctgacgacgtcctattttcgggcaatcgtgcaacgcagccagaatatgacgaatacgatccattattaaacggtgcgccaattaccgaacctgtcgctgtagcagctgctgctaccacggcggcacaaagctgggctgcgccggttgaacctgtgactcagacgccgcctgttgcctctgttgatgttccaccttcgcaacctacagtagcctggcagcctgtaccgggtccacaaacgggagagccggttattgctcctgcaccggaaggttacccacagcagccacaatatgcgcagcctgcagtgcaatataatgagccgctgcaacaaccagtacagccacagcagccgtattatgcacctgcagctgaacaacctgtgcaacaaccttactacgctcctgcggcggaacaacctgttcagcaaccgtattacgcccctgcgccagaacaaccggtggcaggtaacgcctggcaagccgaagagcagcaatccacttttgctccacagtctacataccagactgagcaaacttatcagcaaccagccgctcaggagccgttgtaccaacagccgcaacccgttgaacagcagcctgttgtggagcctgaacccgttgtagaagagacaaaacccgcgcgtccgccactttactattttgaagaagtggaagagaagcgagcccgtgaacgtgaacaacttgcggcctggtatcaaccgattccagaaccggttaaagaaccagaaccgatcaaatcttcgctgaaagcaccttctgttgcagcagtacctccagtagaaaccgctgccgctgtttctccgctggcatctggcgtgaaaaaagcgacactggcgacgggggctgccgcaaccgttgccgcgccagtcttcagtctggcaaatagcggtggaccgcgtccgcaggtcaaagaggggattggcccgcagttgccacgaccgaaacgtatccgcgtgccaactcgccgtgaattggcgtcttacggtattaagctgccctcacagcgtgcggcggaagaaaaagcccgtgaagcccagcgcaatcagtacgattctggcgatcagtacaacgatgatgaaatcgatgcgatgcagcaggatgaactggcacgtcagttcgcccagacacagcagcaacgctatggcgaacagtatcaacatgatgtgcccgtaaacgcagaagatgcagatgctgcggcagaggctgaactggctcgtcagtttgcgcaaactcaacaacaacgttattccggcgaacaaccggctggggcgaatccgttctcgctggatgattttgaattttcgccaatgaaagcgttgctggatgatggtccacacgaaccgttgtttacgccaattgttgaacctgtacagcagccgcaacaaccggttgcaccgcagcagcagtatcagcagccacaacagccggttgcgccacagcagcaatatcagcagccgcaacagccggttgcgccgcagccacaatatcagcagccgcaacaaccggttgcgccacagcagcaatatcagcagccgcaacaaccagttgcgccgcagccgcagtatcaacagccgcaacaaccggttgcgccgcagcagcagtatcagcagccacaacagccagttgcgccacaaccgcaggataccctgcttcatccgctgttgatgcgtaatggcgacagccgtccgttgcataaaccgacgacgccgctgccttctctggatttgctgacaccgccgccgagcgaagtggagccggtagatacctttgcgcttgaacaaatggctcgcctggtggaagcgcgtctggctgatttccgtattaaagccgatgttgtcaattactctccggggccggttatcactcgctttgaattgaacctggcaccgggcgtaaaagcggcgcgcatttctaacttgtcacgggaccttgcccgttcactttcgacggtggcggtgcgtgtcgttgaagttattcctggcaaaccctatgtaggtctggagttaccgaataaaaaacgacaaaccgtttatctgcgcgaagttttggataacgccaaattccgcgataatccgtcgccattaaccgtggtgctgggtaaagatatcgccggtgagccggtggttgccgatctggcgaaaatgccgcacttgttggttgcggggactaccggttccggtaaatctgtcggtgtgaacgcgatgatcctgagcatgctttataaagcacagccagaagatgtgcgtttcatcatgatcgacccgaaaatgctggagctttcggtttatgaaggcattccgcatctgttaacggaagtcgttactgatatgaaagatgccgccaacgcgctgcgctggtgtgttaacgagatggagcgtcgttataaactgatgtctgcgctgggtgtgcgtaatctggcgggttataacgaaaaaattgctgaagccgatcgcatgatgcgtccgattccagacccgtactggaagccgggtgacagtatggatgcccagcatccggtgctgaaaaaagaaccatacattgtggtgttggttgacgaatttgccgacctgatgatgacggtaggtaaaaaagtggaagagctgatagcacgtctggcgcaaaaagcccgtgccgcgggtatccacctcgtactggcaactcagcgtccatcggttgatgttattactggtctgattaaagcgaatattccgacccgtatcgcctttaccgtatccagtaagattgactcacgtaccattcttgatcaggctggcgcggaatcactgctggggatgggggatatgctctactctgggccgaactccacgttgccggtacgtgtccatggtgcttttgttcgcgatcaggaagttcatgccgtggtgcaggactggaaagcgcgtggtcgcccacagtatgttgatggcatcacttccgacagtgaaagcgaaggtggcgcgggcggtttcgatggcgctgaagaactggatccgttgttcgatcaggcggtgcagtttgtcactgaaaaacgcaaagcgtcaatttctggcgtacagcgtcagttccgcattggttataaccgtgcagcgcgtattatcgaacagatggaagcgcaggggattgtcagcgaacaggggcacaacggtaatcgtgaagtgctggctccaccgccgtttgactaattaatgcattgccggataaggcgcggtagcgtcgcatccggcactctatcaactgaaaattcagtattttcttctttcctcaagctgattattagcctggaatagagagtagagggaactcccgatcgggagtgacgtaatttgaggaataatgatgaaaaaaattgccatcacctgtgcattactctcaagcttagtagcaagcagcgtttgggctgatgccgcaagcgatctgaaaagccgcctggataaagtcagcagcttccacgccagcttcacacaaaaagtgactgacggtagcggcgcggcggtgcaggaaggtcagggcgatctgtgggtgaaacgtccaaacttattcaactggcatatgacacaacctgatgaaagcattctggtttctgacggtaaaacactgtggttctataacccgttcgttgagcaagctacggcaacttggctgaaagatgccaccggtaatacgccgtttatgctgattgcccgcaaccagtccagcgactggcagcagtacaatatcaaacagaatggcgatgactttgtcctgacgccgaaagccagcaatggcaatctgaagcagttcaccattaacgtgggacgtgatggcacaatccatcagtttagcgcggtggagcaggacgatcagcgcagcagttatcaactgaaatcccagcaaaatggggctgtggatgcagcgaaatttaccttcaccccgccgcaaggcgtcacggtagatgatcaacgtaagtagaggcacctgagtgagcaatctgtcgctcgatttttcggataatacttttcaacctctggccgcgcgtatgcggccagaaaatttagcacagtatatcggccagcaacatttgctggctgcggggaagccgttgccgcgcgctatcgaagccgggcatctgcattctatgatcctctgggggccaccgggtaccggcaaaacaaccctcgctgaagtgattgcccgctatgcgaacgctgatgtggaacgtatttctgccgtcacctctggcgtgaaagagattcgcgaggcgatcgagcgcgcccggcaaaaccgcaatgcaggtcgccgcactattctttttgttgacgaagtgcaccgattcaacaaaagccagcaggatgcatttctgccacatattgaagacggcaccatcacttttattggcgcaaccactgaaaacccgtcgtttgagcttaattcggcactgctttcccgtgcccgtgtctatctgttgaaatccctgggtacagaggatattgagcaagtactaactcaggcgatggaagacaagacccgtggttatggtggtcaggatattgttctgccagatgaaacacgacgcgccattgctgaactggtgaatggcgacgcgcgccgggcgttaaatacgctggaaatgatggcggatatggccgaagtcaatgatagcggtaagcgggtcctgaagcctgaattattgaccgaaatcgccggtgagcgaagcgcccgctttgataacaaaggcgatcgcttttacgatctcatttccgcactgcataagtcggtacgtggtagcgcacccgatgcggcgctctactggtatgcgcgaattattaccgctggtggcgatccgttatatgtcgcgcgtcgttgcctggcaattgcttccgaagatgtcggcaatgccgacccacgggcgatgcaggtggcaattgcggcctgggattgctttactcgcgttggcccggcggaaggtgaacgcgccattgctcaggcgattgtttacctggcctgcgcgccaaaaagcaacgctgtctacactgcgtttaaagctgcgctggcggatgctcgcgaacgcccggattatgacgtgccggttcatttgcgtaatgcgccgacgaaattaatgaaggaaatgggctacgggcaggaatatcgttacgctcatgatgaagcaaacgcttatgctgccggtgaggtttacttcccgccggaaatagcacaaacacgctattatttcccgacaaacaggggccttgaaggcaagattggcgaaaagctcgcctggctggctgaacaggatcaaaatagccccataaaacgctaccgttaatgttatcgttgcggtaatgttgttactgtatccctgtggtcgcaggctgtggccacatctcccatttaattcgataagcacaggataagcatgctcgatcccaatctgctgcgtaatgagccagacgcagtcgctgaaaaactggcacgccggggctttaagctggatgtagataagctgggcgctcttgaagagcgtcgtaaagtattgcaggtcaaaacggaaaacctgcaagcggagcgtaactcccgatcgaaatccattggccaggcgaaagcgcgcggggaagatatcgagcctttacgtctggaagtgaacaaactgggcgaagagctggatgcagcaaaagccgagctggatgctttacaggctgaaattcgcgatatcgcgctgaccatccctaacctgcctgcagatgaagtgccggtaggtaaagacgaaaatgacaacgttgaagtcagccgctggggtaccccgcgtgagtttgactttgaagttcgtgaccacgtgacgctgggtgaaatgcactctggcctcgactttgcagctgcagttaagctgactggttcccgctttgtggtaatgaaagggcagattgctcgcatgcaccgcgcactgtcgcagtttatgctggatctgcataccgaacagcatggctacagtgagaactatgttccgtacctggttaaccaggacacgctgtacggtacgggtcagctgccgaaatttgctggcgatctgttccatactcgtccgctggaagaagaagcagacaccagtaactatgcgctgatcccaacggcagaagttccgctgactaacctggtgcgcggtgaaatcatcgatgaagatgatctgccaattaagatgaccgcccacaccccatgcttccgttctgaagccggttcatatggtcgtgacacccgtggtctgatccgtatgcaccagttcgacaaagttgaaatggtgcagatcgtgcgcccggaagactcaatggcggcgctggaagagatgactggtcatgcagaaaaagtcctgcagttgctgggcctgccgtaccgtaaaatcatcctttgcactggcgacatgggctttggcgcttgcaaaacttacgacctggaagtatggatcccggcacagaacacctaccgtgagatctcttcctgctccaacgtttgggatttccaggcacgtcgtatgcaggcacgttgccgcagcaagtcggacaagaaaacccgtctggttcataccctgaacggttctggtctggctgttggtcgtacgctggttgcagtaatggaaaactatcagcaggctgatggtcgtattgaagtaccagaagttctgcgtccgtatatgaacggactggaatatattggctaatacccaatttttctgaatctaaaaagcgcctgcgggcgctttttttgtctccctttgataccgaacaataattactcctcacttacacgtaatactactttcgagtgaaaatctacctatctctttgattttcaaattattcgatgtatacaagcctatatagcgaactgctatagaaataattacacaatacggtttgttactggaatcaatcgtgagcaagcttgagtgagccattatgaaaacgaaaatccctgatgcggtattggctgctgaggtgagtcgccgtggtttggtaaaaacgacagcgatcggcggcctggcaatggccagcagcgcattaacattaccttttagtcggattgcgcacgctgtcgatagcgccattccaacaaaatcagacgaaaaggttatctggagcgcctgtacagttaactgtggtagtcgctgcccgctacgtatgcacgtcgtggacggtgaaatcaaatatgtcgaaacggacaataccggcgatgacaattacgacggcctgcaccaggttcgcgcctgcctgcgtgggcgttccatgcgtcgccgtgtctacaatccggaccgcctgaaatatccgatgaaacgagtcggggcgcgcggtgaaggcaaattcgagcgcattagctgggaagaagcctacgacatcatcgcgaccaatatgcagcgcctgatcaaagagtacggcaacgagtctatctatctgaactatggcaccggtacgctgggcggcaccatgacccgctcctggccgccgggaaataccctggtcgcgcggctgatgaactgctgcggcggctatctgaaccattacggcgactactcctccgcgcaaattgcggaaggtttgaactatacctacggcggctgggcagatggcaacagcccgtcggatatcgaaaacagtaagctggtagtgctgtttggtaataaccctggcgaaacgcgaatgagtggcggtggggtgacttactatcttgaacaggcacgccagaaatctaatgcccgcatgatcatcatcgatccgcgctataccgacaccggtgccgggcgcgaagatgagtggatccctattcgtccgggaacagatgccgcactggttaacggtctggcgtacgtcatgatcactgaaaacctggtggatcaggcattcctcgataaatattgcgttggctacgatgagaaaaccctgccagccagtgcgccgaaaaatggccactataaagcttatattctgggtgaagggccagatggcgtggctaaaacaccggaatgggcctcacaaatcaccggtgttccggcagacaaaatcatcaaactggctcgtgaaatcggcagtaccaaaccggcgtttatcagccagggatggggcccgcagcgtcacgctaacggtgaaatcgcaacccgtgctatctcgatgctggcgattctgaccggtaacgttggtattaatggagggaacagcggcgcgcgtgaaggttcatacagcttaccgtttgtccgtatgccgaccttggaaaacccgatccagaccagcatttcgatgtttatgtggaccgatgccattgaacgtggcccggaaatgacggcgctgcgtgatggtgtacgcgggaaagataagctggatgtgccgatcaaaatgatctggaactatgccggtaactgcctggttaaccagcattctgaaatcaaccgtacccatgaaatccttcaggatgataagaagtgcgagctgattgtggttatcgactgccacatgacctcatcggcgaaatatgctgacatcctgctgcctgactgcaccgcttccgaacagatggactttgcgctggatgcatcctgcgggaatatgtcttacgtgattttcaacgatcaggtgattaaaccgcgctttgaatgtaagaccatctatgaaatgaccagcgaactggcaaaacgtcttggcgttgagcaacagtttactgaaggccgtacccaggaagagtggatgcggcatctgtatgcccagtcgcgggaagcgattcctgaactgccaacgtttgaagagttccgcaagcaggggatctttaaaaagcgcgacccacaagggcatcacgttgcttataaagccttccgtgaagatccgcaggcaaacccactgactacgccatcgggcaaaattgagatttattcgcaggcgctggctgacattgccgctacctgggaattgccagaaggcgatgtgatcgatccactgccgatctacacgccgggctttgaaagttatcaggatccgctgaacaaacagtatccgctgcagcttacgggtttccactataaatctcgcgttcactcaacttacggcaacgttgatgtgctgaaagcagcttgccgtcaggaaatgtggatcaacccgcttgatgcgcaaaaacgcggtatcaacaacggcgataaagtcaggatctttaacgatcgtggtgaagttcatattgaggcgaaagtgacgccacgaatgatgccaggtgtggtcgcactgggtgaaggtgcctggtatgacccggatgcaaaacgtgtcgataagggtggttgtattaacgtactgaccactcaacgtccgtctcctctcgctaaggggaatccgtcacatacaaaccttgttcaggttgaaaaggtgtaaggagtaaccgatgacaacccagtatggattttttattgattccagccgttgcaccggttgcaaaacctgcgagctggcttgtaaagactacaaagatttgacgccagaagtcagcttccgccgcatttatgaatatgctggcggcgactggcaggaagataacggtgtctggcaccagaacgtgtttgcctactatctgtcgatttcgtgcaaccactgcgaagatccggcttgtactaaagtctgcccgagcggtgcgatgcataaacgtgaagatggttttgttgtggtcgatgaagatgtgtgcattggctgccgctactgccatatggcttgcccgtatggcgcaccgcaatataacgaaacgaaaggccatatgaccaaatgcgatggttgttatgaccgtgttgcggagggtaaaaagccgatctgtgttgaatcttgtccgctgcgggcgctggatttcggccctatcgacgagctgcgtaaaaaacatggcgatctggcggccgttgcgccgttgccgcgagctcactttaccaaaccgaatattgtgatcaaacccaatgccaatagccgcccgaccggggataccactggctatctggcaaacccgaaggaggtgtgagatgggaagtggatggcatgaatggccgctgatgatcttcacggtcttcgggcaatgtgtggcgggtggttttatcgttctggctttggcgctgctcaaaggcgacctgcgagcagaagcccagcagcgtgttatcgcctgcatgtttggcttatgggtgctgatgggcattggctttatcgcttctatgctccatcttggttcaccgatgcgcgcttttaactcgctcaaccgggtaggggcttcagcactcagtaacgaaatcgccagcggttcgatcttttttgccgtaggcggcatcggctggttgctggcaatgctgaaaaagctgtcaccggcattgcgtacgctttggctggtggtgacgatggttcttggcgtcgtctttgtctggatgatggtgcgtgtgtataacagcattgataccgttccgacctggtacagcatctggacgccgatgggcttcttcctgacgatgttcatgggcggcccgttactggggtacctgttgctgagtctggctggcgtcgatagctgggcgatgcgtctgctgccagccatttccgtactggcactggtggtgagtggcgtggtgtcagtgatgcagggcgcagagctggcgactattcatagttctgtgcagcaggccgcagcgctggtgccggactatggtgcgctgatgtcctggcggatcgtgcttttggccgttgccctgtgcttgtggattgcaccacagctaaaaggttatcagcctgcggttccgctactatccgtctcattcattctgcttctggcaggggaattaatcggtcgcggcgtattctatggtttgcatatgaccgtggggatggccgtcgcaagctaatcagtaacaaccggggtttcggccccggttctcttttatttctgcttcgttaacgtgtcataactggtcatcaaattacgataatcaggaatatggttagagaacaacgtcgccagtccttcaatatcattacgccagtcacggtgcagctcgcaagccacgccgaaccatgtcatcaattgcgcacctgcttgcgacatgcgatcccatgccgaatgccgggtaatttcattaaaggtccctgacgcgtcagtcacaacaaacacatcaaacccttcttcaatggctgaaagcgccgggaatgccacgcaaacttcggttaccacaccggcaataattaactgttttttacctgtcgctttgactgcttttacaaaatcttcgttatcccaggcgttaatattgcccgggcgagcaatgtaaggtgcatcggggaattgtgctttcagttctggaactaatgggccgttaggaccggtttcaaaactggtggtaagaatagttggtaagttgaaatacttagccaggtcacccagcgccagcacgttatttttaaacttatcgggttcgatatcccgtacaagggaaagtaaaccagcctggtgatcaacaagcaaaacagcagcatcatttttatcaagacgaacatacggtttggtcatcctcttctcctttcgagagtcagtggtacgcctgaaatcggtcagacgtgatgcattgctctgaaagcatagacgggaaatatgagtttgctgtgaccatgaaatttttcgactgaacgaagcgtatgaaatttgtgttagatcaataaaaacaatcagatgagattaatcatctcttcagtattagcgttatgaatgagtaatataaatcgataataccgccgttgcgatatgcgcgtattttcacccattgacaatgtttttggcggtggcatgatgcgcatgaaatttgaacttcctcacggttttaattcatgtccacgtatacccggcctgtcatgcttttgctgtctggcctgcttttgttgactctggcgatcgcggtgttaaatacactcgtgccgctttggctcgcccaggaacacatgtccacatggcaggtaggcgttgtcagctcatcctattttaccggcaaccttgtcggtacattgctgacagggtatgtcattaaacgcattggttttaaccgcagctattatctggcctccttcatttttgccgctggctgtgccggccttggcctgatgattggattctggagttggttggcgtggcgttttgtcgcgggcgtcggctgtgccatgatttgggtagtcgttgagagcgcgctgatgtgcagtgggacgtcacgtaaccgtgggcgtttgcttgctgcatacatgatggtttattacgtgggaacgtttttaggccagttactggtcagcaaggtctcaaccgagctgatgagcgtattgccgtgggttacaggtttgacattggcagggatcttaccgctgttgtttacgcgtgtcctgaatcagcaggctgaaaaccatgattcgacgtcaattacggcaatgctaaaactccgtcaggcgcggcttggcgtgaatggctgcattatctcaggaatcgttctgggatctctatatggcctgatgcctctgtacctcaatcacaaaggggtgagcaatgccagtattggtttctggatggcggtactggtcagtgcgggtatcctcggacaatggccgattggacgtctggcggataagtttggtcgactgctggttttgcgtgttcaggtctttgtcgtcattctcggcagtattgcgatgcttagccaggcggcgatggccccagcgttattcatcctcggtgccgctggctttacgctatatccggtggcgatggcatgggcttgcgagaaagttgaacatcatcaactggtggcgatgaaccaagccttactgttgagctatactgtgggaagtctgcttggcccgtcatttaccgctatgctaatgcagaatttctccgataatttattgtttatcatgatcgccagcgtatcgtttatctatttgctgatgctgctgcgcaacgccggtcatacgccgaaacccgttgctcacgtgtaaatgaattcaagcagagtgtgaacttactgtttcacactctgcttttttgtttcttctatctgacttgctttattccaaattttattcgtttaaaaataaaatgtgtagcaggttataattttgcatttcgctatttccgcacttcttatttgccgcgcataatccctcgttttacagatgcccctataattttggcgaaggatttgtctatggctgggaatgttcaggaaaaacagctgcgatggtacaacattgcgctgatgtcttttatcactgtctggggttttggcaacgttgttaataactacgccaaccaggggctggtggttgttttttcatgggtgtttatctttgcgctctatttcacaccttatgcgctaattgttggtcagttaggctcgaccttcaaagatgggaagggcggggtcagtacctggattaaacacacgatgggacccggactggcttatctcgccgcgtggacctactgggtggtgcatattccctatctggcacaaaaaccccaggcaattctgattgcgctcggttgggcgatgaaaggcgacggttcgctaatcaaagaatattcagtcgtagcgttacaggggttaacgctggtgctgtttatcttctttatgtgggttgcttcacgcggtatgaaatcgctgaaaatcgtcggttctgtggcagggattgctatgtttgttatgtcgctcctgtatgtggcgatggcggtaaccgcgcctgcaattactgaagtgcatattgcgaccacaaacattacctgggaaacgttcattcctcatatcgactttacctacattaccactatttcaatgctggttttcgcggttggcggagcagagaagatttctccttacgttaatcaaacgcgcaacccaggaaaagaatttccaaaagggatgttatgcctggcggtgatggttgcggtttgtgccattctgggctcgctggcgatggggatgatgtttgattcgcgtaatatcccggatgacttaatgaccaacggtcagtattacgcctttcagaagctgggcgagtattacaacatgggtaatactttaatggtgatttacgccattgcgaataccctgggacaagtagcggcgctggtattctcgattgatgccccgcttaaagtgctattaggtgatgctgacagcaaatatattccagccagtttatgtcgtaccaacgcttctggtacgcccgttaatggctattttctgaccctggtactggtggcgattctgattatgctgccgactctcggcattggtgatatgaacaatctctataaatggctgttgaaccttaattcggtagtgatgccgctgcgttatttatgggtatttgttgcatttattgcagtcgttcgcctggcgcagaaatataaaccagaatatgtctttattcgtaataagcctctggcaatgaccgtcgggatttggtgttttgcctttaccgcctttgcctgtttgacggggatcttcccgaaaatggaagccttcactgcagagtggaccttccagttggcgctgaatgttgcaacgccgtttgtgctggtaggattaggactgatattcccgctgctggcgcgtaaagcgaatagtaaataattattgtggtcggtgacgctgactctggcagatctgacccgtttttacataatcgagaaatgcgcgcaagccgcaggacatatactggcggtttgggtaatagatctggaagcctggacgctctgtgatccagtcttccagtacacattctaaacgaccggtatcaaggtactccttgatctgttcatagagcagatacccgataccagcacccatcaaaacggcatccagttcagcatcaacatcatccaggtgatgctgccaacttactgatttagtgtatgatggtgtttttgaggtgctccagtggcttctgtttctatcagctgtccctcctgttcagctactgacggggtggtgcgtaacggcaaaagcactgccggacatcagcgctatctctgctctcactgccgtaaaacatggcaactgcagttcacttacaccgcttctcaacccggtacgcaccagaaaatcattgatatggccatgaatggcgttggatgccgggcaactgcacgcattatgggcgttggcctcaacacgattttacgtcacttaaaaaactcaggccgcagtcggtaacctcgcgcatacagccgggcagtgacgtcatcgtctgcgcggaaatggacgaacagtggggctatgtcggggctaaatcgcgccagcgctggctgttttacgcgtatgacagtctccggaagacggttgttgcgcacgtattcggtgaacgcactatggcgacgctggggcgtcttatgagcctgctgtcaccctttgacgtggtgatatggatgacggatggctggccgctgtatgaatcccgcctgaagggaaagctgcacgtaatcagcaagcgatatacgcagcgaattgagcggcataacctgaatctgaggcagcacctggcacggctgggacggaagtcgctgtcgttctcaaaatcggtggagctgcatgacaaagtcatcgggcattatctgaacataaaacactatcaataagttggagtcattacccatcatccagaatgatattccctgcgacagcaatttcctgctcctttgcaaattgccagtggaaaggtttgccgctgggataacgaaatacaacacattgatgattaagcagatcatgaggatggcggggtttgccatatcttgcaaagtactctggcgttgctgctacacataatttcactggtgggccgatcgccacgctgatcatatctttttcgacgatgccactaagtcgaacgccagcgtcaaagccctgttggacgatatcgacaagagagtcgtcagttgtgagctcgactttaatatcaggatattcacgtgtgaaaccaaccagtaaaggcattaaaaatatacgtgcagctacccgggcggcattgattttgagcgttcctgttggtgtcagacgaaaatcattcatctcatctaacatgatctgaatttcgtcgaaagctgggcgcaatcgttcatagagattagaacccgcttccgttaacgatacgcttcgggttgtccgattgaataagcgaattttaagacgttgttccagtgttttaatactatggctaatggcggacgaggataagcctaactcatcgcccgctgcacgaaagctttgattacgggccacagcaaagaaagtggcaaagtcagacatattcatccgcattagtgaaaatccttcattaactcatcctgaatcatcacgtttacatgattatgccgcctgcgtaaagtgcgctccagaacttaacgtggaggtaaaattatgcagtctgaacgtatttatttggtatgggcccatcctcgtcatgattcattgaccgcacatattgctgatgcgatccatcagcgggcaatggagcggaaaatacaggtgacggaactcgatttatatcggcgtaatttcaacccggtgatgacgccggaagatgaaccagactggaagaatatggataaacgttattctccagaggttcatcagctttattcagagctgcttgaacatgacacgttagtggtggtttttcctgtctggtggtacagcttcccggcaatgctaaaaggatatattgacagagtatggaataatgggctggcttatggagatgggcagaaattaccattcaataaagttcgttgggtggcgctggttggaggagacaaagaatcatttgtccagatgggctgggaaaaaaatataagcgattatttaaaaaatatgtgcagttatcttggtattgaagatgccgatgtcactttcttgtgtaatacagtggtattcgatggggaagaacttcacgcgagctattatcagtcgttattatctcaggtacgggatatggtagatgcactataagatgtgttaaaaacgctgtagcagaatgaagtgcggaataaaaaagcggcaactcaataaagttgccgctttacggggaaattagaacattaccttatgaccgtactgctcaagaatgcctttcacgcgttccatggtctctttcttcggtggtttaacaccgtcgagtttgtactcttcacccattgccacccatttgtgtttgcccagctcgtggtaggggagaagctcgattttctcaacgttgcccatatcacgggtaaattcaccgaggcgatgcgctgaatcgtcatcgtcagaccagcctgggacaacaacgtagcggatccacaccttcacatttttgttcgccagatatttggcgaactccagcgtgcggtgattggaaactccaaccagattttggtggatctcgtcgttcatctgtttgagatcgagcattaccaggtcggttacttccagcagttcatcaatcaccggatcgtaacgacgaacaaaaccgttggtgtccagacaggtatgaatgccttcttttttgcaggcgcggaaccagtcacgaacaaactcagcttgtaggattgcctcaccgccggatgcggtaacgccgccgccggaagcgttcataaagtggcgataggtcaccacctctttcattaaatcttcaacggtaacttctttaccgccatgcgtatcccaggtgtcgcggttatgacaatacaggcagcgcatcaggcagccctggaaaaaggtgataaagcgaatacccgggccgtctacggttccacaggattcaaaggagtgaatgcgaccaataactgacattgcggtgtttctccagatgtggcccatctgaggccgtgttggtgcgcagctcgaaggctacgtcgagtctgttttggcagtcaccttagagtatagatagctgacaaaaaaggctctcgtgctaaaaaaggccccactttcgtggagcctttattgtacgctttttactgtacgatttcagtcaaatctaattacatagattgagtgaaggtacgagtaataacgtcctgctgctgttctttagtcagcgagttgaaacgtactgcgtagccagatacacggatggtcagctgcggatatttttccgggttttccatcgcgtcgagcagcatttcacggttcatcacgttaacgttcaggtgctgaccaccttcgatggatgcttcgtggtggaagtaaccatccatcagaccagccaggttggtcttacgaacttcgtcgtctttacccagtgcgttcggaacgatagagaaggtgtaggagataccatctttagcgtaagcaaacggcagtttagcaacggaagtcagagaggctactgcacctttctggtcacgaccgtgcatcgggttagcacccggtccgaacggcgcgccagcacgacgaccgtctggggtgttacccgttttcttaccatacacaacgttagaagtgatggtcagaacagactgagtcgggatagcgtcacggtaggtgtgcagtttctgaattttcttcatgaaacgttctaccaggtcaacagccaggtcatctacacgcggatcgttgttaccaaactgcgggtattcgccttcgatttcgaagtcgatagccagaccgtcttcgtcacgaatcggtttaactttcgcatatttgattgcagacagggagtcagcagcaacggacagaccagcgataccacacgccatggtgcggataacgtcacggtcgtgcagcgccatcagagaggcttcgtagctgtacttgtcgtgcatgtagtggatgatgtttagtgcagtgatgtactgtttagccagccagtccatgaagtgatccatgcgctccatcacttcatcatagttcaggacatcgcctttgatcggttcagacttcggaccaacctgcattttcagtttttcgtcaacgccgccgttgattgcgtacagcatggttttcgccaggtttgcacgcgcaccgaagaactgcatttgtttaccaacgatcatcgggcttacgcagcaagcaatagcgtagtcatcgttgttgaagtccggacgcatcaggtcatcgttctcatactgcagagaagaggtgtcgatggacactttagcggcgaatttcttgaagttcagcggcagtttttcagaccacagaatggtcatgttcggttccggagacggacccatggtgtacagggtgttcaggaaacggaagctgtttttggtaaccagggtacgaccgtcgaggcccataccaccgatagattcggttgcccagatcgggtcgccagagaacagttcatcgtattccggagtacgcaggaagcgaaccatacgcagtttcatgaccaggtggtcaaccatttcctgcgcttcttgttcggtgatcttgccagctttcaggtcacgttcgatgtacacatccaggaaggtggaggtacgaccgaaggacattgcagcaccgttctgagacttaacagcagccaggtagccgaagtaagtccactggatagcttcctgagcgttggtagccggaccagagatgtcgtagccgtatttcgcagccatttctttcatctgacccagagcgcggtgctgttcagcgatttcttcgcgcagacggatagtctgttccaagtttacgccgttttccagatcagcctgcagagaagtgaactgtgccagtttgtctttcatcaggtagtcgataccgtacagcgcaacgcgacggtagtcaccgatgatacggccacggccatatgcatctggcagaccggtcagaacaccagatttacggcaacgcaggatgtccggagtgtaaacgtcgaacacgccctggttgtgagttttacggtattcagtgaagatttttttgatcatcggatccagttcgcggttgtacgctttgcaggaaccttcgatcattttgataccaccgaacgggataagagcacgtttcagcggagcttcagtctgcagaccaacgattttctcaagctgcttgttgatgtagccagcgtcgtgagaggtgatggtggaagcaacagcggtgtcaaagtcaactggcgcgtgagtgcggttttccagtttaacgccttccattactttgtcccacagggtggtggtcgcttcagtagcgccagccaggaaggactcgtcaccctcgtacggagtgtagtttttctgaatgaagtcacggacgtttacttcattctgccagtcacctttggtaaaaccttcccaggctgtggctaacttttcattaagctcggacatgtaacacctaccttcttaagtggattttttatttactgcgtacttcgacaaccattaatggtggtcgttttcacgcaggtaaatgacccagtatgtcaacccaaccaacaaaccaccaccgataatgttgccgatcgtaaccggaatcaggttatcagtgatgaaattcatcacggtcaggtgagaaaaattttccggtgcagaaccgactgcggtccaaaattccggggatgcgaagtcgcggattacaatacccatcgggatcataaacatgtttgcgatactgtgctcaaaaccgctggcaacaaacatcgcgaccggcagcaccataatgaacgctttgtccatcaggctgcggccagaataactcatccatactgccagacataccatcaggtttgccaggataccaagacagacggcctcaataaaagtatggtgcactttgtggtcggcggtttgtaggacgtttagtccccattgaccatttgcggtcatatactcgccggaaagccacattaaaagtacaaacagcagtgcgccgaccaggttgccaaaatagacatttagccagtttttcgccaactgaccccaggtgatgcgcccactcgccttagcaacaacaatcaacacggtggaagtaaagagatcggctccgcagacaacacaaagaatcagccccagagagaagcaaatgccgccaaccagttttgccatgccgaagggcattgtgcctgtgccagtggttgctgtgatatagaagacgaatgcgattgagatgaaaacaccggcggtaatcgccagatagaaagtcttaagcggatgtttcgttgctttatagacacccgcctcttcggccactttggccattgcagcaggaagtaaaagatcaaaagggttgtcagctttcacactaactctctctttattaagtcggcgacgagatactaacaaagcattatagatgagaaattgatatagatcatatctcgcctggcttataggcccgtaactcgcatggtttttatgcagatacggagtaaatatttgattatccaaataaaaataaattttaaaaattaacaaatgagttgaattttttccgcatcctccgctaaaacagttaattaaaagggagcatcaggcgaataaagtaacaatatcgatcgtatttattaaatacaaattaccgatatttaaccttataattacaattattttattaatgcaaatatatgtaaagcggggcattaaaaaaacgccccgtaatataactcagactaatcattaagcctacattgcgtaggctatttgattttattttgcccagaatgctgctttggcgcgctgcagcttttcgtaggccttcaacaacgactgatgtgcagcaaacgcgtgcagatcgctatctaccggttgcaggccgtaaaacgccgcttcgccgctcattgccgcactggcggcttctacggcatctgcgccgtacatgcgaacaaacgcattcagatattgcagcggctggcgatcttcttcctgtgccagtaataacaacgtttgcaggcagcgataatagttggcgcgttccggactaaatactgatgagttaaactccatcgtccattcggtccagaccagagcctgttccagatcgccaccagccagcgccagcatggcttttaattcaccgatacgcagggtgtaccaaccgttatccgacccggtcgccagacccaacagctcacgcacgcgggtaaagtcatcaaaaccttcttcatccagttgctcgatgaggttcaggtaatcttctttttcccactcgctgcctggtagcgaaagaatcgtttcacgtaaatggctgcccatactgttattcgcgagccacagatcttcagccggataaatatcggacatgccaggcacgataatacggcaagcataaacgcccagatgctcgtaatcggcaatataaacttctttatcttctttgttgaagatagccatcagcgtagcaaactcttcttccgtggtgccggagaaattccagtccacaaacggataatcggcatcctgcttgaacaggtcccaggagattaaaccgctggaatcgataaagtgcgtttcgaggttggtatgttcagcgacttcttcatcatcgaaggttggcggagtaaacacatccaaatctttcaggccacgaccttgcagcagctcggtcacggtacgttccagtgctacgccaaaatcaggatgcgcaccgaaagaggcaaagcaggtaccgttagcaggattgaacagtaccacgcaaatcaccggatactggccgccaagcgaaccgtcataagcgaagattgggaaaccctccgcttccagcgtttcgatggcttcaactactgctgggtaacgcgccagcacgtctgccgggatctctggcaggctgatgctttcagcaataatgcggtttttcacgtagcgttcgaaaacttcagacaatccctgaacgcgtgcttcgttgcgggtattacctgcggacataccgttggagacgtacaggttaccaatgatattcatcggaatataaacggtctgattgtcggactgacgcgtaaacggcaggccgcaaataccacgatcttcgttaccggattgtaggtcaatcagcatgctgccggtcagttcattctccggatcataaaacgcgcgcagacggtcatcgagtagtccttctggcacatcgtcattttcggtcagtgggaaccatttttcgttgggataatgcacgaacggaccgttggcgatggtttcgcccagccagaaatcagcaaaaaagtagttggttgagagacgctcgaaatattcaccaagtgcagaagccagcgccgcttttttggttgcgcctttaccgttggtaaaacacagtgcgcactctttgtcgcgaatatgtacagaccagacgttaggcacaggattcagccaggaggcctcttcaatctgaaagccgaggtctgaaagtttttgctggaagcgagcgatggaatcttccagagcggcatctttgccggggataaatgtttgcgtcatgaaaatcactttagtcgtacggaaagcgcgcaataatacgggttttatctcaaaggcgctatcaccgccgccatgccgatgaactgttgactatgcttttagcggataaaccacgataagagcataaaaatgaaggcgttcgatctccaccgtatggcatttgataaagtgccttttgatttccttggcgaagttgcactacgtagtctttatacctttgtactggtttttttgttcctcaaaatgaccggaagacgcggtgtgcgacagatgtcgctgtttgaagtgttaatcattctcacgctgggttcagcggcgggagatgtggcgttttatgatgatgtgccgatggtgccggtacttatcgtctttatcactctggcgttgttataccgcctggtaatgtggttgatggcgcacagtgaaaaactggaagatctactggaaggtaagccggttgttattattgaagatggcgagctggcctggtcgaaactcaataactccaacatgacggaatttgagttctttatggagctacgattgcgtggcgtggagcagctggggcaggtacgtctggcgattctcgaaaccaacgggcaaatcagtgtctatttctttgaagatgacaaggtgaaaccgggtttacttattttacccagtgattgtacgcagcgttacaaagtggtgccggagtcggcggactatgcctgtattcgttgtagtgaaatcattcatatgaaagcgggggaaaaacaattatgtccgcgctgtgcaaatccagaatggacgaaggcaagtcgggcaaaacgggtgacctgacagtaaaaacatcggctttttgctaataatccgagagattcttttgtgtgatgcaagccacatttttgccctcaacggttttactcattgcgatgtgtgtcactgaatgataaaaccgatagccacaggaataatgtattacctgtggtcgcaatcgattgaccgcgggttaatagcaacgcaacgtggtgaggggcaatggctcaaatcttcaattttagttctggtccggcaatgctaccggcagaggtgcttaaacaggctcaacaggaactgcgcgactggaacggtcttggtacgtcggtgatggaagtgagtcaccgtggcaaagagttcattcaggttgcagaggaagccgagaaggattttcgcgatcttcttaatgtcccctccaactacaaggtattattctgccatggcggtggtcgcggtcagtttgctgcggtaccgctgaatattctcggtgataaaaccaccgcagattatgttgatgccggttactgggcggcaagtgccattaaagaagcgaaaaaatactgcacgcctaatgtctttgacgccaaagtgactgttgatggtctgcgcgcggttaagccaatgcgtgaatggcaactctctgataatgctgcttatatgcattactgcccgaatgaaaccatcgacggtatcgccatcgacgaaacgccagacttcggcaaagatgtggtggtcgccgccgacttctcttcaaccattctttcccgtccgattgacgtcagccgttatggcgtgatttacgctggcgcgcagaaaaatatcggcccggctggcctgacaatcgtcatcgttcgtgaagatttgctgggcaaagcgaatatcgcgtgtccgtcgattctggattattccatcctcaacgataacggctccatgtttaacacgccgccgacatttgcctggtatctatctggtctggtctttaaatggctgaaagcgaacggcggtgtagctgaaatggataaaatcaatcagcaaaaagcagaactgctatatggggtgattgataacagcgatttctaccgcaatgacgtggcgaaagctaaccgttcgcggatgaacgtgccgttccagttggcggacagtgcgcttgacaaattgttccttgaagagtcttttgctgctggccttcatgcactgaaaggtcaccgtgtggtcggcggaatgcgcgcttctatttataacgccatgccgctggaaggcgttaaagcgctgacagacttcatggttgagttcgaacgccgtcacggttaatgccgaaattttgcttaatccccacagccagcctgtggggtttttatttctgttgtagagagttgagttcatggaatccctgacgttacaacccatcgctcgtgtcgatggcactattaatctgcccggttccaagagcgtttctaaccgcgctttattgctggcggcattagcacacggcaaaacagtattaaccaatctgctggatagcgatgacgtgcgccatatgctgaatgcattaacagcgttaggggtaagctatacgctttcagccgatcgtacgcgttgcgaaattatcggtaacggcggtccattacacgcagaaggtgccctggagttgttcctcggtaacgccggaacggcaatgcgtccgctggcggcagctctttgtctgggtagcaatgatattgtgctgaccggtgagccgcgtatgaaagaacgcccgattggtcatctggtggatgcgctgcgcctgggcggggcgaagatcacttacctggaacaagaaaattatccgccgttgcgtttacagggcggctttactggcggcaacgttgacgttgatggctccgtttccagccaattcctcaccgcactgttaatgactgcgcctcttgcgccggaagatacggtgattcgtattaaaggcgatctggtttctaaaccttatatcgacatcacactcaatctgatgaagacgtttggtgttgaaattgaaaatcagcactatcaacaatttgtcgtaaaaggcgggcagtcttatcagtctccgggtacttatttggtcgaaggcgatgcatcttcggcttcttactttctggcagcagcagcaatcaaaggcggcactgtaaaagtgaccggtattggacgtaacagtatgcagggtgatattcgctttgctgatgtgctggaaaaaatgggcgcgaccatttgctggggcgatgattatatttcctgcacgcgtggtgaactgaacgctattgatatggatatgaaccatattcccgatgcggcgatgaccattgccacggcggcgttatttgcaaaaggcaccaccacgctgcgcaatatctataactggcgtgttaaagagaccgatcgcctgtttgcgatggcaacagaactgcgtaaagtcggtgcggaagtagaagaggggcacgattacattcgtatcactccaccggaaaaactgaactttgccgagatcgcgacatacaatgatcaccggatggcgatgtgtttctcgctggtggcgttgtcagatacaccagtgacgattcttgatcccaaatgtacggccaaaacatttccggattatttcgagcagttggcgcggattagccaggcagcctgaatgaacaacgggcaataaatagccaaatctttctttatcaaaacgtcggcacattgtcgtaatgccgatcagttaaggatcagttgaccgatccagtggctgtgtaagaatccggaaacgctcacttgtttccggatttttttatgcacattggacaggctcttgatctggtatcccgttacgattctctgcgtaacccactgacttctctgggggattacctcgaccccgaactcatctctcgttgccttgccgaatcaggtactgtaacgctacgcaagcgccgtcttcccctcgaaatgatggtctggtgtattgttggcatggcgcttgagcgtaaagaacctcttcaccagattgtgaatcgcctggacatcatgctgccgggcaatcgccccttcgttgcccccagtgccgttattcaggcccgccagcgcctgggaagtgaggctgtccgccgcgtgttcacgaaaacagcgcagctctggcataacgccacgccgcatccgcactggtgcggcctgaccctgctggccatcgatggtgtgttctggcgcacaccggatacaccagagaacgatgcagccttcccccgccagacacatgccgggaacccggcgctctacccgcaggtcaaaatggtctgccagatggaactgaccagccatctgctgacggctgcagccttcggcacgatgaagaacagcgaaaatgagcttgctgagcaacttatagaacaaaccggcgataacactctgacgttaatggataaaggttattactcactgggactgttaaatgcctggagcctggcgggagaacaccgccactggatgatacctctcagaaagggagcgcaatatgaagagctcagaaaactgggtaaaggcgatcatctggtgaagctgaaaaccagcccgcaggcacgaaaaaagtggccgggactgggaaatgaagtgacagcccgcctgctgaccgtgacgcgcaaaggaaaagtctgccatctgctgacgtcgatgacggacgccatgcgcttccccggaggagaaatggcggatctgtacagtcatcgctgggaaatcgaactgggatacagggagataaaacagacgatgcaactgagcaggctgacgctgagaagtaaaaagccggagcttgtggagcaagagctgtggggtgtcttactggcttataatctggtgagatatcagatgattaaaatggcggaacatctgaaaggttactggccgaatcaactgagtttctcagaatcatgcggaatggtgatgagaatgctgatgacattgcagggcgcttcaccgggacgtataccggagctgatgcgcgatcttgcaagtatgggacaacttgtgaaattaccgacgagaagggaaagggccttcccgagagtggtaaaggagaggccctggaaataccccacagccccgaaaaagagccagtcagttgcttaactgactggcattacggcacattgtcggcgttttttttcggaccttgtgagtcattttgattaatggtagcgtcgcttgtcaatgtaagttgttgatacataatatttatatatgattaatcaacggatgattcacatgaagaatactaaattactgctggcgattgcgacctctgcagcattactgacagggtgtcaaaatacccacggtattgataccaatatggctatcagctccggtttaaatgcctataaagcagcaacattaagcgatgccgatgcaaaagcgattgccaatcagggctgtgccgaaatggacagcggcaatcaagtcgcaagtaaatccagcaagtacggtaaacgtctggcaaaaatcgccaaagcattgggtaacaatattaatggcacgccggtcaactataaggtttatatgaccagcgacgtcaacgcatgggcgatggcgaacggctgtgtccgtgtctacagtggcctgatggacatgatgaatgacaacgaaattgaaggtgttctgggccatgaactgggccacgtcgcgttgggtcactcgctggctgaaatgaaagcttcttatgcgatcgttgccgcacgcgatgccatttcagctaccagcggtgtggcttcccagctttcccgctcacaattgggtgatatcgcagaaggcgctattaatgctaaatactcccgtgataaagagtccgaagcagatgatttctcctttgatctgttgaagaaacgtggcatcagcacccaggggctggttggcagctttgaaaaactggctagtctggatggcggtcgcacccagtccatgtttgactctcacccaccatcaacagagcgtgcgcaacacatccgtgatcgtatcgcctctggtaagtaaatcattgtcatctttcgggctggtcttctgccagcccgctataattgcgcaataaatccccatctgaatacagacaaaactggtttttgcacacaacgttaacgatttgtggcgtcggcgcgtataatgcgcgcggttatgttaacggtacgcctgttttaaggagataaagatgacggcaattgccccggttattaccattgatggcccaagcggtgcagggaaaggcaccttgtgtaaggctatggcggaagcattgcaatggcatctgctggattcgggtgcaatttatcgcgtactggcgttggcggcattacatcaccatgttgatgttgcgtcagaagatgcgctggtaccgctggcatcccatctggatgtacgttttgtgtcaaccaatggcaatctggaagtgatcctcgaaggggaagatgtcagcggcgaaattcgtactcaggaagtggcgaatgcagcttcacaagtcgcggcattcccacgcgttcgtgaagcattattgcgtcgccaacgcgcgtttcgcgaattaccaggcctgattgccgatggccgcgacatgggaacggtggtattccctgatgcgccagtgaaaattttccttgacgcctcctcggaagaacgtgcgcatcgccgcatgctacagttgcaggagaagggctttagtgttaactttgagcgccttttggccgagatcaaagaacgcgacgaccgcgatcgtaaccgagcggtagcgccactggttccggcagccgatgctttagtgttggattccaccaccttaagcattgagcaagtgattgaaaaagcgctacaatacgcgcgccagaaattggctctcgcataagcgaccgaatttgcagtacccccgttgcaatggaatgacagcgggtatgttaaacaaccccatccggcatggagccaggtggacgttaaatataaacctgaagattaaacatgactgaatcttttgctcaactctttgaagagtccttaaaagaaatcgaaacccgcccgggttctatcgttcgtggcgttgttgttgctatcgacaaagacgtagtactggttgacgctggtctgaaatctgagtccgccatcccggctgagcagttcaaaaacgcccagggcgagctggaaatccaggtaggtgacgaagttgacgttgctctggacgcagtagaagacggcttcggtgaaactctgctgtcccgtgagaaagctaaacgtcacgaagcctggatcacgctggaaaaagcttacgaagatgctgaaactgttaccggtgttatcaacggcaaagttaagggcggcttcactgttgagctgaacggtattcgtgcgttcctgccaggttctctggtagacgttcgtccggtgcgtgacactctgcacctggaaggcaaagagcttgaatttaaagtaatcaagctggatcagaagcgcaacaacgttgttgtttctcgtcgtgccgttatcgaatccgaaaacagcgcagagcgcgatcagctgctggaaaacctgcaggaaggcatggaagttaaaggtatcgttaagaacctcactgactacggtgcattcgttgatctgggcggcgttgacggcctgctgcacatcactgacatggcctggaaacgcgttaagcatccgagcgaaatcgtcaacgtgggcgacgaaatcactgttaaagtgctgaagttcgaccgcgaacgtacccgtgtatccctgggcctgaaacagctgggcgaagatccgtgggtagctatcgctaaacgttatccggaaggtaccaaactgactggtcgcgtgaccaacctgactgactacggctgcttcgttgaaatcgaagaaggcgttgaaggtctggtacacgtttccgaaatggattggaccaacaaaaacatccacccgtccaaagttgttaacgttggcgatgtagtggaagttatggttctggatatcgacgaagaacgtcgtcgtatctccctgggtctgaaacagtgcaaagctaacccgtggcagcagttcgcggaaacccacaacaagggcgaccgtgttgaaggtaaaatcaagtctatcactgacttcggtatcttcatcggcctggacggcggcatcgacggcctggttcacctgtctgacatctcctggaacgttgcaggcgaagaagcagttcgtgaatacaaaaaaggcgacgaaatcgctgcagttgttctgcaggttgacgcagaacgtgaacgtatctccctgggcgttaaacagctcgcagaagatccgttcaacaactgggttgctctgaacaagaaaggcgctatcgtaaccggtaaagtaactgcagttgacgctaaaggcgcaaccgtagaactggctgacggcgttgaaggttacctgcgtgcttctgaagcatctcgtgaccgcgttgaagacgctaccttggttctgagcgttggcgacgaagttgaagctaaattcaccggcgttgatcgtaaaaaccgcgcaatcagcctgtctgttcgtgcgaaagacgaagctgacgagaaagatgcaatcgcaactgttaacaaacaggaagatgcaaacttctccaacaacgcaatggctgaagctttcaaagcagctaaaggcgagtaattctctgactcttcgggatttttattccgaagtttgttgagtttacttgacagattgcaggtttcgtcctgtaatcaagcactaagggcggctacggccgcccttaatcaatgcagcaacagcagccgcttaatttgcctttaaggaaccggaggaatcatgaccaagtcagaattgatagaaagacttgccacccagcaatcgcacattcccgccaagacggttgaagatgcagtaaaagagatgctggagcatatggcctcgactcttgcgcagggcgagcgtattgaaatccgcggtttcggcagtttctctttgcactaccgcgcaccacgtaccggacgtaatccgaagactggcgataaagtagaactggaaggaaaatacgttcctcactttaaacctggtaaagaactgcgcgatcgcgccaatatttacggttaagtttttactcaaacttgaacgcgagaaaagcacctgtcgggtgcttttttcatttctctaatcaggaactggaagctgcctcgcagagttttgagcagttttcaccctctcgttaaattcttctgaatgtgcctcggggaacgcaaaattcccaccagacaaccgctcaacaaagttgcacactttccataaacagggaggagtgcatgaaaataacgacagtcgacgtatgcataatttgcggaatttttccgttgctgattttgccccaattgcctgggacattagcccttgcgtttctgactctcttcgcctgcgtactggcatttatacctgttaaaaccgtccgttatatcgcgctgacgttgctgtttttcgtttggggcatattatcagcaaagcaaattttgtgggcaggagaaaccttaactggcgcgacgcaggatgcaattgttgagatcactgctactgacggcatgaccactcattacggtcaaattacttatctacaaggtcgacgtatattccctgcgccaggccttgtgctgtatggcgaatatcttccgcaagcggtttgtgccggacaactgtggtcaatgaaactcaaagttcgtgccgttcatggtcaacttaatgatggcggctttgatagccagcgttatgccattgcccagcatcagccgctcaccggccgctttctgcaggcaagtgttattgaaccgaattgtagcctgcgtgcacagtatctggcgtcactacaaacaacgctgcaaccctatccgtggaatgcggttattcttggtttaggtatgggggaacggttatccgtccccaaagaaatcaaaaatatcatgcgcgatactggaacggcgcatttaatggcgatatcgggattgcacatcgcttttgcggtgttgctggctgccggactcattcgcagtggacaaatttttctgcctgggcgctggatccactggcaaataccattaattggtgggatctgctgtgctgctttttatgcctggttgacgggaatgcaacctcctgcattgcgtaccgtggtggcgcttgctacgtggggaatgcttaagttaagtgggcgacagtggagtggctgggatgtatggatatgttgtctggcggcaattttgctgatggatcctgttgccattctctcgcaaagtttatggctctctgccgctgcggtcgcggcactgattttttggtatcagtggtttccctgtcctgagtggcaactgccgccggtattgcgtgcagttgtttccctcatccatctgcaactgggtatcacacttctgcttatgcccgtgcaaatcgtcatatttcatggcattagtctgacctcgtttattgcaaatctattagcaattcccttggtgacatttatcacggttccgttgatcctcgccgcgatggttgtgcatttaagcgggccgttaatcctggagcaagggttatggtttcttgccgaccggtctttggctttacttttctgggggttaaagagtttgccagaagggtggatcaacattgctgaacgttggcaatggctatcattggatttgcccctatatttccagacatctgttatcacttaacccattacaagcccgctgccgcagatattcccgtggcgagcgataacccagcgcactatgcggatgccattcgttataatgctcgaacgcctctgcaaggttctttgctgccgttaacccgtctggtttgggcatgatactgatgtagtcacgctttatcgttttcacgaagctctctgctattccgttactctccggactccgcaccgccgtgttcttcggttcaagtcccaacatccgggcgaactggcgtgtttcattagcccggtagcatgaaccattatccgtcagccactccactggagacgacggaagatcgttgccgaagcggcgttccaccgctcccagcatgacgtcctgtactgtttcactgttgaagccgccggtagtcaccgcccagtgcagtgcctcacgatcacagcagtccagcgcgaacgtgacacgcagtctctctccgttatcacagcagaactcgaacccgtcagagcaccatcgctgattgctttctttcacggccactctgcctgtatgtgcccgtttcgatggcggtacagcaggttttcgctcaagcaacagcgcattctggcgcatgatccggtaaacacgtttggcattgatcgcaggcataccatcaagttctgcctgtctgcgaagcagcgcccatacccgacgataaccatacgtgggcagctctccgataacatggtgtatacggagaagcacatccgtatcatcagtgtgacgactgcggcggccatccatccagtcatcggttcgtctgagaatgacgtgcaactgcgcacgcgacacccggagacaacggctgactaagcttactccccatccccgggcaataagggcgcgtgcgctatccacttttttgcccgtccatattcaacggcttctttgaggagttcattttccatcgttttcttgccgagcaggcgctggagttctttaatctgcttcatggcggcagcaagttcagaggcaggaacaacctgttctccggcggcgacagcagtaagacttccttcctggtattgcttacgccagagaaataactggctggttgctacaccatgttgccgggcaacgagggagaccgtcatccccggttcaaagctctgctgaacaattgcgatcttttcctgtgtggtacgccgtctgcgtttctccggccctaagacatcaatcatctgtactccaatgactagtctaaaaactagtattaagactatcacttatttaagtgatactggttgtctggagattcagggggccagtctaatcattttccccatggttcttactggtggtatggcgattaaacgcctggcgaacgttgccagcaatgtgtgtggctgtaggcttgctgatgtgctggccgctgtggcaaaaacctcgacctgacgagtggcaggtgtacatgcttgatgtcgggcaagggctggcaatggtgatagccagaaacggcaaagcgattctctatgacacaggactggcctggcccgaaggggatagtgggcaacaactgattatcccctggctccactggcataatcttgaaccggaaggcgttattctgagtcatgaacatctggatcaccggggagggctggactcaatattgcacacatggccgatgttatggatcagaagtccgttaaactgggaacatcatcagccctgtgtgcgtggcgaagcgtggcaatggcaaggattgcgtttcagcgtgcactggcctttacaagctagcaacgataaaggaaataaccattcctgtgtggttaaggttgatgacgggacgaatagcattcttctaaccggtgatattgaagtccccgctgaacaaaagatgctaagccgttactggcagcaagtgcagacaacattgcttcaggtacctcaccatggcagtaatacctcatcatcgttgccattaattcagcgagtgaatggaaaagtggcactcgcatcggcatcgcgctataacgcatggcgattgccctcaagcaaagttaaacatcgctatcaacaacagggttataagtggcttgatactcctcatcaggggcaaataacggtcaatttttcagcgcaaggctggcggattagcagcctcagggagcaaattttacctcgttggtatcatcagtggtttggcgtgccagtggataacgggtagaatatgcggctatttcaacaaatgctggttttttgaatgcataacgacaaagatctctctacgtggcagacgttccgccgactgtggccaaccattgcgccttttaaagcgggtctgatcgtggcgggcgtagcgttaatcctcaacgcagccagcgataccttcatgttatcgctccttaagccacttcttgatgatggctttggtaaaacagatcgctccgtgctggtgtggatgccgctggtggtgatcgggctgatgattttacgtggtatcaccagctatgtctccagctactgtatctcctgggtatcaggaaaggtggtaatgaccatgcgtcgccgcctgtttggtcacatgatgggaatgccggtttcattttttgacaaacagtcaacgggtacgctgttgtcacgtatcacctacgattccgaacaggttgcttcttcttcttccggcgcactgataacggttgtgcgtgaaggtgcgtcaatcatcggcctgttcatcatgatgttctattacagttggcaactgtcgatcattttgattgtgctggcaccgattgtttcgattgcgattcgcgttgtatcgaagcgttttcgcaacatcagtaaaaacatgcagaacaccatggggcaggtgaccaccagcgcagaacaaatgctgaagggccacaaagaagtattgattttcggtggtcaggaagtggaaacgaaacgcttcgataaagtcagtaaccgaatgcgtcttcaggggatgaaaatggtttcagcctcttccatctctgatccgatcattcagctaatcgcctctttggcgctggcgtttgttctgtatgcggcgagcttcccaagtgttatggataacctgactgccggtacgattaccgttgttttctcttcaatgattgcactgatgcgtccgctgaaatcgctgaccaacgttaacgcccagttccagcgcggtatggcggcttgtcagacgctgtttaccattctggacagtgagcaggagaaagacgaaggtaagcgcgtgatcgagcgtgcgactggcgacgtggaattccgcaatgtcacctttacttatccgggacgtgacgtgcccgcattgcgtaacatcaacctgaaaattccggcagggaaaacggtcgctctggttggacgctctggttcaggtaaatcaaccatcgccagcctgatcacgcgtttttacgatattgatgaaggcgaaatcctgatggatggtcacgatctgcgcgagtataccctggcgtcgttacgtaaccaggttgctctggtgtcgcagaatgtccatctgtttaacgatacggttgctaacaacattgcttacgcacggactgaacagtacagccgtgagcaaattgaagaagcggcgcgtatggcctacgccatagacttcatcaataagatggataacggtctcgatacagtgattggtgaaaacggcgtgctgctctctggcggtcagcgtcagcgtattgctatcgctcgagccttgttgcgtgatagcccgattctgattctggacgaagctacctcggcgttggataccgaatccgaacgtgcgattcaggcggcactggatgagttgcagaaaaaccgtacctctctggtgattgcccaccgcttgtctaccattgaaaaggcagacgaaatcgtggtcgttgaggatggtgtcattgtggaacgcggtacgcataacgatttgcttgagcaccgcggcgtttacgcgcaacttcacaaaatgcagtttggccaatgatcgaaaaaatctggtctggtgaatcccctttgtggcggctattgctgccactctcctggttgtatggcctggtgagtggcgcgatccgtctttgctataaactaaaactgaagcgcgcctggcgtgcccccgtaccggttgtcgtggttggtaatctcaccgcaggcggcaacggaaaaaccccggtcgttgtctggctggtggaacagttgcaacagcgcggtattcgcgtgggggtcgtatcgcggggatatggtggtaaggctgaatcttatccgctgttattgtcggcagataccacaacagcacaggcgggtgatgaacctgtgttgatttatcaacgcactgatgcgcctgttgcggtttctcccgttcgttctgatgcggtaaaagccattctggcgcaacaccctgatgtgcagatcatcgtaaccgacgacggtttacagcattaccgtctggcgcgtgatgtggaaattgtcgttattgatggtgtgcgtcgctttggcaatggctggtggttgccggcggggccaatgcgtgagcgagcggggcgcttaaagtcggttgatgcggtaatcgtcaacggcggtgtccctcgcagcggtgaaatccccatgcatctgctgccgggtcaggcggtgaatttacgtaccggtacgcgttgtgacgttgctcagcttgaacatgtagtggcgatggcggggattgggcatccgccgcgcttttttgccacgctgaagatgtgtggcgtacaaccggaaaaatgtgtaccgctggccgatcatcagtctttgaaccatgcggatgtcagtgcgttggtaagcgccgggcaaacgctggtaatgactgaaaaagatgcggtgaaatgccgggcctttgcagaagaaaattggtggtatttgcctgtagacgcacagctttcaggtgatgaaccagcgaaactgcttacgcaactaacctcgctggcttctggcaactagttacgccgcggcagcgttcgattgatggagtcatgaatgtcactgccgcacctctcccttgctgatgcgcgtaatcttcaccttgccgcacaaggcctgttaaacaaaccccgccgtcgagcgtcgttggaggatattccggcaacgatctcccgcatgtccttgctgcaaatcgataccatcaatattgttgcccgtagtccatatctggtgcttttcagtcgtctgggaaattatcctgcccagtggctggatgagtctctggcgcgtggcgaattaatggaatactgggcgcatgaagcctgctttatgccgcgtagcgactttcgtcttattcgccaccgcatgctggcacctgaaaaaatgggctggaaatacaaagacgcctggatgcaggaacatgaggcggaaattgcacagttaattcagcatattcatgataaggggccggtacgttcagccgattttgagcatcctcgtaaaggtgcaagcggctggtgggaatggaagccgcataaacggcatctggaaggtttatttactgccggaaaggtgatggtgattgaacggcgcaacttccagcgcgtttatgatttaacccaccgtgtcatgcctgactgggatgatgagcgcgatctcgtttcgcaaacagaagcagaaatcatcatgctggataacagtgcgcgtagcctgggaatattccgcgaacagtggctggcagattactatcggctgaaacgtccggcactggcggcgtggcgcgaagcgagggctgaacagcagcaaatcattgctgtgcatgttgaaaaattgggcaatctttggctgcatgctgatttgctgccgctactcgagcgtgcgctggccggaaagctcactgcaacgcacagcgcggtactttcgccttttgatcctgttgtctgggatcgcaaacgcgcagagcagctttttgattttagctaccggctggagtgctataccccagcgccgaaacgccagtatggctattttgttctgccattattacatcgtgggcaattagttgggcgaatggatgccaaaatgcatcgccagacaggcatccttgaagttatctctctgtggttacaggaaggcattaaaccaacgacaatgctgcaaaaagggttacgtcaggcgattactgatttcgcgagctggcagcaggcaacgcgggtgacattaggacgctgcccgcaaggtctctttactgattgccgcactggctgggaaatagaccccgtcgcataaatgattatgataagatttatgcattcataacccgatccatctggaggaactatggatcatcgtttgcttgaaatcattgcctgcccggtttgcaacggaaaactttggtataaccaggaaaaacaagagcttatttgcaaactggataacctggctttcccgctccgcgatggcattccagtgttgctggaaacggaagcccgcgtgctgactgctgatgagagtaaatcatgagttttgtggtcattattcccgcgcgctacgcgtccacgcgtctgcccggtaaaccattggttgatattaacggcaaacccatgattgttcatgttcttgaacgcgcgcgtgaatcaggtgccgagcgcatcatcgtggcaaccgatcatgaggatgttgcccgcgccgttgaagccgctggcggtgaagtatgtatgacgcgcgccgatcatcagtcaggaacagaacgtctggcggaagttgtcgaaaaatgcgcattcagcgacgacacggtgatcgttaatgtgcagggtgatgaaccgatgatccctgcgacaatcattcgtcaggttgctgataacctcgctcagcgtcaggtgggtatggcgactctggcggtgccaatccacaatgcggaagaagcgtttaacccgaatgcggtgaaagtggttctcgacgctgaagggtatgcactgtacttctcacgcgccaccattccttgggatcgtgatcgttttgcagaaggccttgaaaccgttggcgataacttcctgcgtcatcttggtatttatggctaccgtgcaggctttatccgtcgttacgtcaactggcaggcaagtccgttagaacacatcgaaatgttagagcagcttcgtgttctgtggtacggcgaaaaaatccatgttgctgttgctcaggaagttcctggcacaggtgtggatacccctgaagatcttgagcgcgttcgcgctgaaatgcgctaatttcacttcacgacacttcagccaattttgggaggagtgtcgtaccgttacgattttcctcaatttttcttttcaacaattgatctcattcaggtgacatcttttatattggcgctcattatgaaagcagtagcttttatgagggtaatctgaatggaacagctgcgtgccgaattaagccatttactgggcgaaaaactcagtcgtattgagtgcgtcaatgaaaaagcggatacggcgttgtgggctttgtatgacagccagggaaacccaatgccgttaatggcaagaagctttagtacgcccggaaaagcccgacaactggcatggaaaaccaccatgctggcaagaagtgggactgtccgtatgccgactatttatggtgtgatgacgcatgaagaacaccccggccctgatgtcctgctactggagcggatgcgtggtgtttcggtggaggcaccagcccgaacaccagaacgctgggaacagctcaaagaccaaatcgttgaagccttactggcctggcaccgtcaggacagtcgcggttgcgtcggcgcggtcgacaatactcaggaaaatttctggccctcatggtaccggcaacatgttgaagtgctatggaccacgctcaatcagttcaataacaccggtctgacgatgcaggataagcggatcctgtttcgcactcgcgaatgtctcccggcattatttgaaggctttaacgacaattgtgtgttgattcacggtaacttctgtttacgcagcatgctgaaagattcgcgcagcgatcagttactggcgatggtcgggccgggactaatgctttgggcaccgcgagaatacgaactgttccgactaatggataattctctggcggaagatttgctctggagttacctgcaacgcgcgccagtggcggagtcgttcatctggcggcgttggttgtatgtgttatgggatgaagttgcgcaactggttaataccggacgatttagtcggcgcaacttcgatctggcatcaaaatcactcttgccgtggctcgcctgacggacctttcagccactgccagatgcggccaagcgtttcatagccaacacgatcgctatgcatcagccagaccggagaagggattgcccgttcccacggattaagcggcgagtcgatggccaactgattcgccggggctggtagcggatttaactcttcctgctgaaaaaagatcatcgcccgcggcagatgtgatgcggaggtcaccagcaggaaaggggcgtcaccaatcgcctgtttcactgccgcagcttcttcttcggtatcttttggcaaatccagggtgataatttgctcgcgcggcacgcccagcgattgcgcaactctggcacctacttccgctgtactcaccgtattggtttttgctacgcctcccgtgaagatcagttttgatcccggattttcgcgccataagcgaataccttcattcaggcgtggcagactgttattgattaaattagagctcggtgcccactgcgggttccaggtataaccacctccgagcaccacgatatagtccactttttgcgaattattccatgtcggataggtgctttcgatgggacgcagcaggcggtcggctaccggttgcaaactcaataacaagagtgccagccacccaatgctaataaaaatcttcgcggttttttgaaaacggctaaaccacagcagcgccaggccagcgccaataattaacaacatcagcggaagtggcagcaacatattgccaatcacttttttcagtgtaaaaagcatcctttctggttccttttttaaccatatagcaagggatcgccagcgatattacaccagacgggttcattctcgccgtggctgtgacaaaatagcgtctttatcagaaaacgtcttagccaaccggtggagaaagcaatgcaggatcgcaattttgatgatattgcggaaaagttttcccgtaacatttacggcaccaccaaagggcagcttcgacaggctattctgtggcaggatctcgatcgcgtgctggcggaaatgggtccgcaaaaactgcgtgtgctggatgcgggcggtggagaagggcagaccgcaatcaaaatggccgagcgcgggcatcaggtcattttatgcgatctttctgcgcagatgatcgaccgcgcaaaacaggcggcagaagcaaaaggtgtgagcgacaacatgcaatttatacattgcgccgctcaggatgttgcttcgcatttggaaacgcccgttgatctgatattgttccatgcggtgctcgagtgggtggccgatccccgcagtgtattgcagaccctgtggtcagtgttgcgtccaggcggcgtgttgtcgttaatgttctacaatgcgcatggtttgttgatgcataacatggtcgccgggaattttgattacgtgcaggcgggaatgccgaaaaagaaaaaacggacgctttcgccagattatccacgcgacccggcgcaggtttatctgtggctggaagaagctggttggcaaattatgggtaagacaggcgttcgcgtgtttcatgattatctgcgcgagaagcaccagcagcgcgactgctatgaagcattacttgaattagaaacgcgttattgccgtcaggaaccgtatattaccctggggcgttatattcatgtcaccgcgcgcaaaccgcagagcaaggataaagtatgagtgaattttcccagacagtccccgaactggttgcctgggccagaaaaaatgacttctccatctcgctgccggtagaccgactctcttttctgctggcggttgccacgctgaacggcgagcgtctggatggtgagatgagtgaaggcgagctggtggatgcattccgccatgtgagtgatgcgtttgagcaaaccagcgaaaccatcggcgtgcgcgccaataacgcgatcaacgacatggtgcgtcaacgtctgctgaaccgctttaccagcgagcaggcggaagggaacgcaatttaccgtctgacgccgctcggcatcggcattactgactactacatccgtcagcgcgagttttctacgctgcgtctttctatgcagttgtcgattgtggcgggtgagctcaaacgcgcagcagatgccgccgaagagggcggtgatgaatttcactggcaccgtaatgtctatgcgccactgaaatattcggtagcagaaattttcgacagtatcgacctgacgcaacgtctgatggacgaacagcagcagcaggtgaaggacgatatcgcccagttgctgaacaaagactggcgggcggcgatttccagctgtgaattgttgctttcggaaacttccggaacgctgcgtgaattgcaggatacgctggaagcggcaggcgacaaattgcaggctaatctgttgcgcattcaggatgcgacgatgacccatgacgatctgcatttcgtcgatcgtctggtgttcgatctgcagagcaaactcgatcgtattatcagttggggccagcaatccatcgacttgtggattggctacgaccgccacgtacacaaatttattcgtaccgcgatcgatatggataaaaaccgcgtctttgctcagcggttacgtcagtcggtacaaacctattttgatgagccgtgggcgctaacttatgccaatgccgatcgtctgctggatatgcgtgacgaagagatggcactgcgcgatgaagaagtgactggggaacttcctgaggatctggaatacgaagagtttaacgagatccgcgaacagctggcggcgatcatcgaagaacaacttgccgtgtacaaaaccagacaagtgccgctggatcttggtctggtggtacgcgaatatctgtcacagtatccgcgtgcacgtcactttgacgttgcgcgtattgttattgatcaggcggtacgtcttggcgtagcgcaagcagatttcaccggactgccagcgaaatggcagccgattaatgattacggagccaaggtacaggcgcatgtcatcgacaaatattgaacaagtgatgtcggttaagctggcgcaggcgctggcgaatccgttatttccggcgctggacagcgccttacgttcaggccgccatattggcctcgacgaactggataatcatgcattcctgatggattttcaggaatatctggaagagttttacgcgcgttataacgttgagcttattcgcgcaccggaagggttcttctatttacgcccacgttccaccactcttatcccgcgttccgtcttgtcggaactggatatgatggtcgggaaaatcctctgttatctctatctcagcccggaacggctggcgaatgaggggattttcacccagcaggaactgtacgacgaactgctcaccctggccgatgaagcaaaactgctgaaactggtgaacaaccgttcaaccggttcagacgttgaccgtcagaagttgcaggagaaagtacgttcttcgctcaaccgtctgcgtcgtttaggcatggtgtggtttatgggccacgacagcagcaagtttcgcattaccgaatcggtgttccgcttcggagccgatgtgcgtgctggcgacgatccccgtgaagcacagcgtcgcctgattcgtgatggcgaagcaatgccgattgaaaatcatctgcaactcaacgatgaaaccgaagagaatcagccagatagcggagaggaagaataatgattgaacgcggtaaatttcgctcactgacgctgattaactggaacggcttttttgcccgaacttttgaccttgacgagctggtcacgacgctttctggcggtaacggggcgggtaaatccaccaccatggcggcgttcgttacggcgctgatccccgacctgaccctgctgcatttccgtaacactacggaagccggggccaccagcggttcgcgcgataaaggtctgcacggtaagctgaaagcgggtgtctgttattcgatgctcgacaccattaactcgcgccaccagcgcgtggtggtcggtgtgcgtctgcaacaggttgccggacgcgatcgtaaagtggatatcaaaccatttgccattcagggactgccgatgtcggtgcagccgacacagctggtgaccgaaaccctgaacgaacgccaggcgcgcgtgctgccgcttaacgagctgaaagacaagctcgaggcgatggaaggcgtgcagtttaaacagttcaactccattaccgattaccactcgctgatgttcgatctgggcatcatcgcgcgtcgtctgcgctccgcatctgaccgtagcaaattctatcgtctgatcgaagcttcgctgtatggcgggatctccagtgccattacccgttctctgcgcgactacctgttgccggaaaacagcggcgtgcgtaaagcgttccaggacatggaagcggcgctgcgtgaaaaccgcatgacgctggaagcgattcgtgtcacccagtcggaccgtgacctgtttaagcatctgatcagcgaagctaccaactacgtggcggcggactacatgcgtcacgccaacgagcgccgtgtccatctcgacaaagccctggagtttcgtcgcgagttacatacttcgcgtcagcaactggcggctgagcagtacaaacacgtcgatatggcgcgtgagctggcagagcacaacggtgccgaaggcgatctggaagcggattatcaggcggccagcgatcacctgaacctggtgcaaaccgcacagcgtcagcaggagaagatcgaacgctacgaagcggatctcgatgagctgcagatccgtctggaagagcaaaacgaagtggtggcagaagccatcgaacgccaggaagagaacgaggctcgcgcggaagctgccgaactggaagtggacgagctgaaaagccagcttgctgactaccagcaggcgctggacgtccagcaaacgcgcgcgatccagtataaccaggcgattgctgcgcttaatcgcgccaaagaactgtgccatctgccggacttaaccgccgacagcgccgccgaatggctggaaaccttccaggcgaaagagctggaagcgactgaaaaaatgctctctcttgagcagaaaatgagcatggcgcaaaccgcgcacagccagtttgagcaggcttatcagctggtggtggcaatcaacggcccgctggcgcgtaacgaggcttgggatgtcgcccgcgaactgctgcgcgaaggggtcgatcagcgtcacctggcagagcaggttcaaccgttgcggatgcgcttaagtgaactggaacagcgtctgcgcgagcagcaagaagccgaacgcctgctggcagacttctgcaaacgtcagggcaagaattttgatattgatgaactggaagctctgcatcaggagctggaagcgcgcattgcctctctttccgatagcgtgtctaacgcccgtgaagagcgcatggcactgcgccaggaacaggaacagctgcagtctcgcattcagagtttgatgcagcgtgcgccggtttggctggcagcgcaaaacagtctcaaccagttgagcgagcagtgcggtgaagagtttacctccagccaggacgtcaccgaatatctgcaacagttgctggagcgtgagcgagaggcgattgttgaacgcgatgaagtgggcgcgcgcaaaaacgctgtcgatgaagagatcgaacgtttaagccagcctggcggctctgaagatcagcgtctgaacgcgctggcggagcgttttggcggcgtgctgctgtcagaaatttatgacgacgttagcctggaagatgcgccgtacttctcagcgctgtatggcccgtcacgccacgccatcgtggtgccagatctgtcacaggtaactgaacacctggaaggcttgaccgattgcccggaagatctctatttgatcgaaggggatccgcagtcattcgatgacagcgtgttcagcgttgatgagctggaaaaagcggtagtggtgaaaatcgccgatcgtcagtggcgttattcacgtttcccggaagtgccgctgtttggtcgtgctgcgcgtgaaagccgtattgaaagcctccatgccgagcgtgaagtgctttccgaacgcttcgccacgctctcctttgatgtacagaaaacccagcgtctgcatcaggcgttcagccgctttatcggcagtcatctggcggtggcgtttgagtctgacccggaagcagaaatccgtcaactgaacagccgtcgcgtcgaactggagcgggcgttgagtaatcatgaaaatgataaccagcagcagcgtattcagtttgagcaggcgaaagaaggcgttacggcgctgaaccgcattctgccgcgtctcaacctgttggctgatgacagcctggcggatcgcgtcgatgaaatccgcgaacgtctggatgaagcccaggaagccgcgcgttttgttcagcagtttggcaatcaactggcgaaactggaaccgatcgtttcggtattgcagagcgacccggaacagttcgaacagctaaaagaagattacgcgtactctcagcagatgcagcgcgatgcccgtcagcaggcgtttgccctgacggaagtggtgcagcgtcgtgcgcactttagctattctgactcggcagaaatgctgagcggtaatagcgatctcaacgaaaagctgcgtgaacgtctggaacaggcggaagcggagcgtactcgcgctcgtgaagcgttgcgtggtcacgcagcgcagttgagtcagtacaaccaggtgctggcttcgctgaaaagttcttacgacaccaaaaaagagctactcaacgatctgcaacgtgaattgcaggatatcggcgtgcgcgccgatagcggggcagaagagcgggcgcgaattcgccgtgacgagctgcatgcgcaactgagtaataaccggtcccgccgcaaccagctggaaaaagcactgactttctgcgaagcggagatggacaatctgacccgcaaactgcgcaagctggagcgggattactttgagatgcgcgagcaggtagtgaccgccaaagcgggctggtgtgcagtgatgcgcatggtgaaagataacgtcgttgaacggcgcttacaccgtcgcgagctggcttatctctccgctgatgatttgcgctctatgtcggataaggcattgggtgcgctgcgtctggcggtggcggataacgaacatctgcgcgacgtgctgcgcatgtcggaagatccaaaacgtccggaacgtaaaattcagttcttcgtggcggtttatcagcatctgcgtgaacgtattcgtcaggatattattcgtaccgatgatccggtggaagccatcgagcagatggaaatcgaacttagccgactgaccgaggagttaacctcccgcgaacagaaactggcgatcagttcccgcagcgtggcgaacatcattcgcaaaaccattcagcgcgaacagaaccgtatccgtatgctcaaccaggggttgcagaacgtatcgtttggtcaggtgaacagcgtacgtctgaacgtgaacgtgcgtgaaacgcacgccatgctgctggatgtgctctctgaacagcacgagcagcatcaggatctgtttaacagcaaccgtctgaccttctcggaagcgctggcgaaattgtatcagcgtcttaatccgcagattgatatggggcagcgcacgccgcagaccattggcgaagaactgctggattaccgcaactatctggaaatggaagttgaggttaaccgtggttccgatggctggttgcgcgcagagtctggtgcattgtcgaccggtgaggcgattggtaccggtatgtcgattctggtgatggtggtacaaagctgggaagatgaatctcgccgcctgcgcggtaaagatatctctccttgccgcctgctgttcctcgatgaagcagcgcgactggatgctcgttctatcgccacgctgtttgaattgtgtgaacgtttgcaaatgcagctcatcatcgcagcgccggaaaatatcagcccggagaaaggcaccacctataaactggtgcgtaaagtcttccagaataccgaacacgttcacgtcgtcggcctgcgaggatttgcgccgcaactccctgaaacgcttccaggaagtgacgaagcgccttctcaggagagttaaaattaaggcggcagcaatgccgccttttctttttccgaaaactccgtttctgcactaaaaaagtggcacattacggcgtaatgccgatcagttaaggatcagttgaccgatccagtggctgtgtaagaatccggaaacgctcacttgtttccggatttttttatgcacattggacaggctcttgatctggtatcccgttacgattctctgcgtaacccactgacttctctgggggattacctcgaccccgaactcatctctcgttgccttgccgaatcaggtactgtaacgctacgcaagcgccgtcttcccctcgaaatgatggtctggtgtattgttggcatggcgcttgagcgtaaagaacctcttcaccagattgtgaatcgcctggacatcatgctgccgggcaatcgccccttcgttgcccccagtgccgttattcaggcccgccagcgcctgggaagtgaggctgtccgccgcgtgttcacgaaaacagcgcagctctggcataacgccacgccgcatccgcactggtgcggcctgaccctgctggccatcgatggtgtgttctggcgcacaccggatacaccagagaacgatgcagccttcccccgccagacacatgccgggaacccggcgctctacccgcaggtcaaaatggtctgccagatggaactgaccagccatctgctgacggctgcagccttcggcacgatgaagaacagcgaaaatgagcttgctgagcaacttatagaacaaaccggcgataacactctgacgttaatggataaaggttattactcactgggactgttaaatgcctggagcctggcgggagaacaccgccactggatgatacctctcagaaagggagcgcaatatgaagagctcagaaaactgggtaaaggcgatcatctggtgaagctgaaaaccagcccgcaggcacgaaaaaagtggccgggactgggaaatgaagtgacagcccgcctgctgaccgtgacgcgcaaaggaaaagtctgccatctgctgacgtcgatgacggacgccatgcgcttccccggaggagaaatggcggatctgtacagtcatcgctgggaaatcgaactgggatacagggagataaaacagacgatgcaactgagcaggctgacgctgagaagtaaaaagccggagcttgtggagcaagagctgtggggtgtcttactggcttataatctggtgagatatcagatgattaaaatggcggaacatctgaaaggttactggccgaatcaactgagtttctcagaatcatgcggaatggtgatgagaatgctgatgacattgcagggcgcttcaccgggacgtataccggagctgatgcgcgatcttgcaagtatgggacaacttgtgaaattaccgacgagaagggaaagggccttcccgagagtggtaaaggagaggccctggaaataccccacagccccgaaaaagagccagtcagttgcttaactgactggcattacacattacggcgcgcttttctttaaacttctttacattaggttatgtaaaaacgtatcggcgtttatatactgaagataagcctgatgagtaacaggcttgctcgtcatactttcgtgagtattggcgttgtacaggcaagtcgtaaaataacagcctggctattcagagtatgataaaaacagggggcaagggatgttgcttaatatgatgtgtggtcgtcggctgtcggcaatcagtttgtgcctggccgtaacattcgctccactgttcaatgcgcaggccgatgagcctgaagtaatccctggcgacagcccggtggctgtcagtgaacagggcgaggcactgccgcaggcgcaagccacggcaataatggcggggatccagccattgcctgaaggtgcggcagaaaaagcccgcacgcaaatcgaatctcaattacccgcaggttacaagccggtttatcttaaccagcttcaactgttgtatgccgcacgcgatatgcaacccatgtgggaaaaccgtgatgctgttaaagccttccagcaacagctggcagaggtggcgattgccgttttccagccgcagtttaataaatgggtagagttactgaccgatcctggtgttaacgggatggcacgcgacgtagtgctctctgatgcgatgatgggctatctccatttcattgcaaatattccggtcaaaggcactcgctggctatatagcagtaaaccttatgcacttgcaacgccgccgctctcggtgattaaccaatggcagctggcgctggataaaggtcaattgcctacgtttgttgcaggactggcaccgcagcatccgcaatatgcggcgatgcatgaatcgttactggccttactcagtgacaccaaaccgtggccccaactgaccggcaaagcaacgttgcgcccagggcagtggagtaacgacgtaccggcgttgcgcgaaatattgcaacgcacaggcatgttggacggggggccgaaaattactctacctggcgatgacacgccaactgacgcggtagtcagcccatccgctgttactgttgaaacagcagaaactaagccgatggacaagcaaacgacgtctcgtagtaaacctgcgcctgccgttcgcgccgcctacgataatgaactggtggaagccgttaaacgttttcaggcatggcaaggattgggggcagatggtgctattggcccggcaacacgtgactggttaaacgtaacgcccgcccagcgtgctggcgtgttggctctcaacatccagcgattgcgcttgctgccaacagagctttctaccgggatcatggttaacattccggcctattcgctggtctactatcagaacggcaatcaggtgctggattcgcgagtcattgtcggtcgccccgatcgcaaaacgccgatgatgagcagtgcccttaacaacgtagtggtaaacccgccgtggaacgtacctccaactctggcacgcaaagatattctgccaaaagtgcgcaacgatccgggatatctcgaaagccatggctatacggtgatgcgcggctggaacagcagagaagcgattgacccatggcaggttgactggtctacaatcacggcctcgaatttaccgttccgcttccagcaggctccaggcccacggaactcgctggggcgctataaattcaatatgccgagttcagaggccatttatttgcatgacacgccgaaccacaatctgttcaagcgtgatacacgcgcattgagctcaggctgtgtacgagtgaataaagcttccgatctggcgaatatgctgttgcaggatgcaggctggaatgacaaacgtatttctgatgcgctgaagcagggtgatacacgttacgtcaatattcggcagtcgattccggtgaatctctactacctgacggcctttgttggtgcagatggtcgtacccagtatcgtacagatatttacaattatgatctgcctgcgcgatccagctcgcaaatcgtatcgaaagcggaacaattaatcaggtaaatgaagtagttcggggaaatcagttgtcgtaataattagcatgattgggggcgattctctgcagcccccgtcactgctggggttgagtcatcttgacgtctgctttacgggcggttaaggtgcctcttgtgcgccagaagtgcatataaacgataacattgacctgtagacttgattatcatggacaaattcgacgctaatcgccgcaaattgctggcgcttggtggcgttgcactcggtgccgccatcctgccgacccctgcgtttgcaacactctctaccccacgcccgcgcattttgacactcaataatcttcataccggagagtcaatcaaagcggagtttttcgatggcagaggctatattcaggaagaattggcaaaacttaaccattttttccgcgattaccgcgcgaacaaaataaagtccatcgacccaggattattcgaccagttgtatcgcctgcaagggttgttaggcacgcgcaaaccggtgcaactcatttccggttatcgttctattgataccaacaatgaactacgcgcccgcagccgtggagtagcgaagaaaagctatcacactaaaggccaggcgatggatttccatattgaaggtatcgcgttaagcaatattcgcaaagccgcgttatctatgcgcgcaggtggtgtaggatattatccacgtagtaactttgtgcatattgataccgggccagcacggcactggtagtaattgcttaacgaaacaggggcagtatgaactatcgtattattccggtcaccgcattctcccagaactgttcattaatctggtgtgaacaaacccgtctggccgcactggtcgatcctggcggcgatgcggaaaaaatcaaacaggaagttgatgacagcggcctgacactgatgcagatcctgctgacgcatggtcatctggaccacgttggcgcagcggcggaactggcgcaacattacggcgtgccggtttttggcccggaaaaagaagatgagttctggctgcaaggcttgcctgcgcaaagtcgtatgtttggtctggaagagtgccagccgctgacgccagatcgttggctgaacgaaggcgataccatcagcatagggaatgtgactttacaggtgttacattgccctgggcatacgccgggtcatgtcgtgttttttgatgatcgggcaaagctgctgatttctggcgatgttattttcaaaggcggagtagggcgcagtgacttcccgcgtggcgatcataatcaactgatttcttcaatcaaagataaattgctgccactgggggatgacgtgacatttattccgggtcacggaccattatccacacttggttatgaacgcctgcataatcccttcctgcaagacgaaatgcccgtctggtaaggcacataaaaaagcccgcttttaatgcgggcctggatttctggcaaagtgcgctttgtttatgccggatgcggcacgagcgccttatccggcctacaaaatcgtgcaaattcaaaatattgcaggggacgcgtaggcctgataagcgtagcgcatcaggcaatgttgcgtttgtcatcagtctcagcccgcttttcagcgggcttcattgtttttaatgcttacagcactgccacaatcgcttcgcacagcggagccatgttatctggtgtcatcccggccacatttacgcgaccagaagcaaccgcatatacgccaaactcttcgcgcagacgcagcacttgttcttttgtcaggccactgaaggagaacatgccgttctgtttgatgataaagctgaagtcgcggtttgcgcctttttcctgcagcgtattgacgaacaactgacgcatacgctgaatacgctggcgcatatcagtcagctcttgttcccaaatcgcacgtaacgcatcgttgctcaggatggtggcaacaacagaagcgccgtgtgctggtgggttagagtagttagcgcgaatcgccgctttcatttggctgaatgcgcgatcaacggtttcactgtcggcagcaaccagagtacaagcgccaacacgctcgttgtacaggccaaagtttttagagtaggaactggcaacaatcagctctttatgcatagccgcgaaagcgcgcagtccttcagcatcttcttccagaccacgggcaaaaccctggtaagcgaagtcaaacagcggtaaccagcctttctcaacggagagttgtgccagtgtctgccattgttccagcgtagggtcgataccggttgggttatggcagcagccatggaacagcactacgtcgccagcctgagcttcattcaggctgttaatcagtgcatcgaagtcaagagtgtgattttccgcatcataataagcgtattcacgaacttccagacctgcagagttaaagacgctcttatggttcggccagcttgggttgctcacccacactcgcttaacgctggtattttttgccaggaaatcggcagctacgcgtagtgcgccagtgccccccggagtctgtgccgtgcgagcacgtttgtcattgatcagggcgctacctttaccaaacagcagttcctgagtgcagcgaccaaattcagggatgccgtcaatgccgaggtaatttttggtggtttcattttcgagcagatactgttcagcctttttcacgctggtcagtaccggggttttgcccgtctcatctttatagacaccaatcccgaggttaattttgccgggacgttcatcggcacgaaacagatcggccaggcccagaatcgggtcggcaggagcggcggtaatgttctcaaacatgacgaggttccattatggttacagaagggaagtccgctatcagggtaacgggagatttacaaaattccaactattactgatgaaaacgcaggctgtttttgcaagacgtgagattgctctggaaggtataaaaaaaacaggaccaaagtcctgttttttcggcatttaacaaagaggtgtgctattagaactggtaaacgatacccacagcaacggtgtcgtctgaacctacgcccagtttgttgtcagaatcgatctggttgatgatgtagtcaacataggtggacatgtttttgttgaagtagtaggttgcgcccacttcaaagtagttcaccagctcaacatcaccgataccttctacgtctttcgctttagatttggtgtaagcgatggacggacgcagaccgaaatcgaactggtattgcgcaactaacagaacgtcttgcgttttgttggcgaagccgctggtgtttgtaaatttattagtgatcggcgtagcgttacgggtttcaccgtagttcgctgccaggtagatgttgttcgcgtcgtacttcagaccagtagcccactgttcagcttttttaccgttgccaagaggttgagcttcttgcaggttggtacggtcagctgcaccataagcaccaacgataccaaagccttcgtattcgtagctgatagaaccgccaacaccgtcgccgttagaacggcgtgcagtgtcacgctcgtttttacccaggtactgaacagcgaagttcaggccatcaaccagaccaaagaagttggagttacgataggtagcaacgccgccaacacgaccaacgaagaagtcatcgctgtatgcagtatcaccaccaaattctggcagcatatcggtgtaacccagtgcatcataaaccacaccgtagttacggccgtaatcgaaagaaccaacgtcagcgtatttaagacccgcgaatgccagacgcgttttgttaccagtttgagcgtcagcgccttcagagttgttaccctggaagttatattcccactgaccataaccggtcagatcggaattgatttgagtttcccctttaaaaccaagacgggcataggtcatgtcgccattgccaccgtaactgttttcaccgttacccttggaaaaataatgcagaccaacagctttaccgtacagatctactttgttgccatctttgttatagatttctgcagcgtttgcagtacctgctactaacagagcagggacgatcactgccagaatattgcgcttcatcattatttattaccctcatggttttttttatgacacctgccactgcgtcaataagttctgtcaataaaaatttacggaactattgatgagagtttggtgtctttatgtgtctgcaggcatctttccattcaaactaacgtttcgctaccgtgaaagtgctacaaagataaagatttagtttcaaaaagaaaaaatatgtaaccaaaagtaaaaattaaggaactttgtgaacaccgtcatatttccatagaaacgtgatgatatttacagcaatttttatctatttatatgatttacttatatttaaattaactaaacggaaattttgtttctgatggaaactttatcgacctggcacaaaatcctctttcagacatccagaatgccaaaaaatagtatgaaaattgtgctatcagctaagaaaaaactaatccgcaataagaatgcgggttattttttgtgcgtaaatgttgcaatgtaatattccgtaacaggatgatcgttatggcggggttgcaaatagattgcttgacttaacaaacagataacttgacagaaaggataaaaaagagccagcaggcgctggctctttgaggaagaaaatcagaagctggcgttgcgcggagtacgtgggaacggaatcacatcacgcacgttttgcacgccagttacgtaagcaatcaggcgttcaaaaccaagaccgaaacctgaatgcggaacagtaccgtagcgacgcagatcgcgataccaccagtaatcttctttattcaggcccatttccagcatacgctcgtccagaacgtccagacgttcttcacgctgggagccaccaatgatctcaccgatgcccggagccagaacgtccatagccgcaacggttttaccgtcttcgttgaggcgcatatagaacgctttaatatctttcggatagtttttaaccactaccggtgctttaaagtgttcttccgccagataacgctcatgctcagaagagagatcgacgccccagtaaaccgggttttcaaacttcctgccgcagttttcgagaatggtcactgcgtcggtgtaatccacctgcgcgaaatcggcctcaatgaagcgttccagacgtgaaacggcatctttatctacgcgttcagcgaagaatttcatgtcgtctgcgcgttcttcgagaaccgctttgaagacatatttcagcatggcttcagccagacccgcgatatcgttcaggttagcaaacgccacttccggctccagcatccagaattccgccaggtgacggctggtgttggagttttcagcacggaaagtcgggccgaaggtataaattttggataatgcgcaagcgtaggtttcgccgttcaactggccagatacggtcaggaaagactctttaccaaagaagtctttgtcgaaatccactttgccctgatcgttacgcggcaggttttccagatccagcgtagaaacgcggaacatttcgcctgcaccttcggtatcagatgcggtaatcagtggcgttgaaacccagaagaatccctgctcgttaaagaagcgatgcagcgcctgcgccagcgtatggcgaacgcgcgcgacggcaccaatcaggtttgtgcgcggacgcaggtgagcgacttcacgcagatactcaatgctgtggcgttttgccgccatcgggtaagtgtctggatcttcaacccaaccagcaacttcaaccttgctggcctgaatttcaaattgttgcccctggcccggcgatgccacgactttacccgtcacaatgaccgagcagccggtggtcagacgcaggacgtcttcattgtaattgggcagagaattattgatgacagcctgtacaggatcaaagcaggaaccgtcataaacggcgaggaaggagatgccagcttttgaatctcggcgggtacgtacccatccgcgtacggtgacttcgctgtcaacggctacgcggccctggagtacgtcggctacaggcacaacgctcataatattctctctgttaatagtcggaaaaaataaacacttgtccacccgtaaatgggggggatacctatgttacctggcatctgcaatcagacaagcagaattcgcaaatgcagcgaaagatttcggaattaaaggtaaaaaaagggagccgattagctccctgatgatattaactggcttttttaatatgcggaaggtcgaacgctttgcgcagcgcccgaacaaacgctttatcatggcagatagttttgccagggctgtcagaaagtttcgccaccggtttaccgttacactctaccaacttaatcacaatattcaggggttttacctgggggatatcgcaggtcaggcgagtcccaataccaaaacttaattgcacgcgggaagagaagtggcggtatagctcaaccgctttgcgtaaatccagattgtcagagaaaaccagcgttttactctgtggatcaattcccagcttttcataatgtgcaatggctttttcaccccattcaaccgggtcgccagagtcatgacgcaggccctgataccgactagcgaactcgacaccgaaatcacgcaggaaagcatccatagtgatgcagtcggttaatgcaatgccaagttggtcgggatactcttccagccaggcagcaagtgcagctcgctggctgttggctagatccgggctgatttgctgatgtgcctggaaccattcgtgtgcctgtgttcccatcggcgtgagggaaagccgacgcgccagatcgtagttgctggtgcccacgaaccaggattcctgttgcagacgcttaacgatggtttcttgtacttcgcgagaaaaacggcgacgggtgccaaaatccatcagatggaagcgcgacatatcaagaccggcggttaacgccgagaagtcgactaatttgctttccagcgtgtcgagggcttgcgcaacgtcggcctgcggtgagcgatagcgatgtaccatttcactgataaccgccagcaaaggaacttcccagaggatgacttcacgccacggaccgcttaagcgaatatccagcttgccattatcgttggacacggtgacttgttccgggttaaagcggaactcgcgtaaccagttaagatagtcggccttaaagaaaggcagggcagagagccactgatattcatcatcctgcaggcgcaggtgctgcatcgcctgaatctgttcacgaatagcatcggcataaatacccagcagatcgtcacctcggcaacgaaactccgccgcgacatgcacatcgtaatagtgatgaaacacggcttgctgcatatgcaacttataagcatctgtatccagcaacgagtgcagaacaggagaagcgaattgtgtcataggtgcgcagtagcgtcctcgtacaggagcgtttagtacaataaacatcttcaggaactgctggagtataccttgtttcgcaatttattgaaccccgatcacaccatatgccacctttctggtcgatggcattacgcggtgtatgttataaaaatgtagcaataaaggcgtttgtacctgaaaagatgaagattctgcatagcgcgatttacgcaacaggaatagactgaacaccagactctataaaagatgctaaaggttatttatgactcaacagccacaagccaaataccgtcacgattatcgtgcgccggattaccagattactgatattgacttgacctttgacctcgacgcgcaaaagacggtcgttaccgcggtcagccaggctgtccgtcatggtgcatcagatgctccacttcgtctcaacggcgaagacctcaaactggtttctgttcatattaatgatgagccgtggaccgcctggaaagaagaagagggcgcactggtcatcagtaatttgccggagcattttacgcttaagatcgttaatgaaataagcccggcggcgaataccgcgctggaagggctttatcagtcaggcgatgcgctttgcacccagtgtgaagccgaaggtttccgccatattacgtattatctcgaccgcccggacgtgctggcgcgttttaccaccaaaattattgccgataaaaccaaatatcccttcctgctttccaacggtaaccgcgttgcgcaaggtgaactggaaaacggacgccattgggtacagtggcaggacccgttcccgaaaccgtgctacctgtttgcgctggtggcaggcgactttgatgtactgcgcgacacctttaccacgcgttctggtcgcgaagtggcgctggagctgtacgtcgatcgcggcaaccttgatcgcgcgccgtgggcgatgacctcgctgaaaaactcaatgaaatgggatgaagaacgcttcggcctggagtatgacctcgacatctatatgatcgtcgcggtggatttcttcaatatgggcgcaatggagaataagggtctgaatatctttaactccaaatatgtgctggcccgcaccgacaccgccaccgacaaagattacctcgatattgaacgcgttatcggccatgaatatttccataactggaccggtaaccgagtgacctgccgcgactggttccagctcagcctgaaagaaggtttaaccgtcttccgcgatcaggaattcagctctgaccttggttcccgcgcagttaaccgcatcaataatgtgcgcaccatgcgcggattgcagtttgcggaagacgccagcccgatggcgcacccaatccgcccggacatggtcattgagatgaacaacttctacaccctgaccgtttacgagaagggcgcggaagtgatccgtatgatccacaccctgctgggcgaagaaaacttccagaaagggatgcaactctatttcgagcgtcatgatggtagcgcagcgacctgtgacgactttgtgcaggcgatggaagatgcgtcgaatgttgatctctcccatttccgccgttggtacagccagtccggtacgccgattgtgaccgtcaaagacgactacaatccggaaactgagcagtacaccctgaccatcagccagcgcacgccagccacgccggatcaggcagaaaaacagccgctgcatattccgtttgccatcgaattgtatgacaacgaaggcaaagtgatcccgttgcagaaaggcggtcatccggtgaattccgtgctgaacgtcacccaggcggaacagacctttgtttttgataatgtctacttccagccggtgcctgcgctgctgtgcgaattctctgcgccagtgaaactggaatataagtggagtgatcagcaactgaccttcctgatgcgtcatgcgcgtaatgatttctcccgttgggatgcggcgcaaagtttgctggcaacctacatcaagctgaacgtcgcccgtcatcagcaagggcagccgctgtctctgccggtacatgtggctgacgctttccgcgcggtgctgctcgatgagaagattgatccggcgctggcggcagaaatcctgacgctgccttctgtcaatgaaatggctgaactgttcgatatcatcgacccgattgctattgccgaagtacgcgaagcactcactcgtactctggcgactgaactggcggatgagctgctggctatttacaacgcgaattaccagagcgagtaccgtgttgagcatgaagatattgcaaaacgcactctgcgaaatgcctgcctgcgcttccttgcttttggtgaaacgcatctggctgacgtgctggtgagcaagcaataccatgaagcaaacaatatgaccgatgcgctggcagcgctttctgcggcggttgctgcacagctgccttgccgtgacgcgctgatgcaggagtacgacgataagtggcatcaggacggtctggtgatggataaatggtttatcctgcaagccaccagcccggcggcgaatgtgctggagacggtgcgtggtctgttgcagcatcgctcatttaccatgagcaacccgaaccgtattcgttcgttgattggtgcgtttgcgggcagcaacccggcagcgttccatgccgaagatggcagcggttaccagttcctggtggaaatgcttaccgacctcaacagccgtaacccgcaggtagcttcacgtctgattgaaccgctgattcgcctgaaacgttatgatgccaaacgtcaggagaaaatgcgcgcggcgctggaacagttgaaagggctggaaaatctctctggcgatctgtacgagaagatcaccaaagcactggcttgatacttttgagccaaaatgcctgatgcgacgcttgacgcgtcttatcaggcctacaactccgttgaaattgctggttttgtaggctggataaggcgttcacgccgcatccggcagccgtgcccaactgcctgatgcgatgcttgacgtgtcttatcaggcctacaagtccgttgaaaatgctggttttgtgcgccacatccggcatattaaccatgacgccgaatcagttgttcagaatgcccacgccgcattacccgttgcaatacttccgcttccagctccgctaatcgcaccgaccctaatcgacgcggacgggggatatccactgtcaaatccagaccaatttttccctcttcaattaacaacacccggtcagccattgctaccgcttcgctcacatcatgcgtcaccaacagtacggtaaagccgtgctgctgccaaagtgacacaatcaaatcctgcatctcgagtcgcgttaaggcgtccagtgccccgagcggttcatcaagcaacaataaacccggtcgatgaatcaacgctcttgccagcgccacacgctgtttctgcccgccagaaagtgcggcaggccattccccggcgcgattctccagtcctactgcagccaacgcccgacgcgcggcatcgcgccactggcctttaaggcctaacccaacgttatcaatcaccgatttccacggcagcagacgcgcatcctgaaacatcattcgcgtgtcttcctgaatctcagccagcggtgtggtgcccgctaacacatcgcctgcggttggcgtttccagacctgccagcaggcgcagcagggtacttttgccaccaccgctgcggcccaccaccgccacaaactgacctgccggaatatgtaaatccagttggttcaggacgatattttccgcgtaatgtttgcttactgcattgagcaacaatggtgtgccctggttcagacgagcagtattcataccgtggcctccttcaaatgataagccgggttccagcgcaaccagaggcgctctaacagctgcgcgctgacgtcagcaagtttgccgagcagggcgtaaagaataatagcgactaccaccacgtccgtttgcaaaaactcccgcgcattcatcgccagataaccaatgcctgaattggcagaaatggtttcggcaacaatcagcgtcagccacatcaggcccaacgcaaaacgcacgccgaccataattgagggcagggcaccaggcaggatcacatggataaacagcggtatgccggataatccatagctacgcgccatttccaccagaccgcgatcgatattacggatgccatgccaggtgttgatataaatggggaatagcgtgccgagcgccaccagaaagatttttgcggattcatcaatgccaaaccacaaaatcaccagcgggatcagcgccagatgcggtacgttgcgcaacatctgaattgaggtatccagcagccgttctccccagcgtgacagcccgctaatcagtcccagaatcaagcccagcgatccgccaattgaaaagccaatcagcgcccgccaggaactgatcgccagatgctgccacaattcgccgctggcggagagcgtccagaacgccgtcaccactccttccggtgaaggcaaaatacgcgtcgacagccagccaaccgaggaggccagttgccacaccgccacgatgcccaccggtaaaaaccagggggcaacgcgcaataaccacttcttcactggcgttgccatcatcgtgttccttagctttgcgcgactttacgggggataaaatcattcgccaccgcttcgccttgcggattcagcggctgcggctggggaatttccggaatggcgacatccagatgtgggaacagcaactcgccaacccgatacgcttcttccagatgcgggtagcccgaaagcacaaagctgtcgatgccaagcgcggcgtattcgttgattcgcgcggcgaccgtaggaccatcgcccaccagcgccgttccggcaccgccgcgcactaagccaacgcccgcccataaattggggctgatctccagattgtcgcgcttgccgttatgtagcgccgccattcgctgttgtcctacggaatccgtccgggcgaatgcggcctgtgctttggcgatagtttcatcatcaagatgcgagattaaccgctcggcggcctgccacgcttcgtcgttagtttcacgaacaatcacatgcagacgaataccgaaacgaattttgcgtccatgcgcggcagctttcgcccgcacttgttcgatcttctcttttaccagctctggcggttcgccccaggtgaggtagagatcaacttgttctgccgccagctcctgggcgacatctgacgatccgccaaagtaaagcggaggatacggctgttgaatcggcgggaagagcagttttgctccccgcacatgaatatgtttaccgttgaaatcgacgctttcccccagcaataagcgccccgccagacctgggtaaattccgccgaggcttcgtagcgctcgctatgatcaaggaacacgccgtcgcctgccaactcttgtggatcgctgcctgtgaccagattaaacaacgcacgaccatttgagagacggtcaagcgtggcggcctggcgagcggcaacggtaggtgaggttacgctgggacgcagggcgacaagaaacttcagccgctgcgtcaccgggatcatcgacgccgccaccagccacgcatcttcacacgatcgccccgttgggatcagcacaccggtatagcccagacgatccgccgcttgcgcaatttgttgcagatagccgtgatcaaccgggcgtgaaccttcttccgttccaagataatgcccgtcaccatgggtcggtaaaaaccagaacatattcagactcataattgttttccttccaggtgagtgggctgccagatgcgctggcgaatatcaacttttttcgacaccagacggttttcataaaacagatctgccgtttgctgctgtaaggcggcaacttcagcgctcaccggtttgatggtggtgggaggacgatgatccagatacgaggcaatcaccggtgccggtaagcccatcgtttttgccagtaaagcgatgctttgctcgcgctggctgcgggttaacgcatcggcctcactaaaggttgccagtacgccctgaataaaagcgccgtttttttctgcataggggcgagctgccagataaaacgatccagtttgattgagatcggtgccgtctttcagcacccgcacgccgccctgtaataacgcagcggagtagtagggatcccagatagcccaggcgtcaacgttaccttgctggaacgcggcgcgggcatcagctggcgtcagataagtgggctggatgtcagtaaacttaagtccggcctgacgcagtgcacgcagtaaaaggttgtgtgaactggaacctttctgaaaggcaactttgtgacctttaagatcggctacggttttgatcgggctgttttctgccaccagaatcacttcggctttgggcttcggtggctcgacgcccacatatatcaaatcagccccggcagcctgggcaaagattggcggaatatccccggtactgccgagatcaatactgccaacgtttaacgcttccaacatttgcggacccgcggggaactccacccaggagatttttgattgcggatagcgtttttccagtaactggtggctttttgccaataccataccaatactgcctttctgatagcctatacgtaacgcttcaggcgaggattctgcagcaaccgcaaaagtagagacgctaagcaatcccgccagcgccagtttaatgatgttacgcatggacattacctcgcagagacagaaggtcaggaacctgaacatcgcggcggtgcaatgcctgccagaaagtttctagcgcggtatcaagacgggtttgcagatttggcgtgaactggggtttgtgatggtaatcaataacttgtgagtcatcggcaaacacgccgtgcaggagctcctgggctttcatcgcacttaaaactggcttaagggcataatcgaccgccagcagatgagccaccgtaccgcccgtcgccagcggtagcaccactttgccttgcaaagcgcgctctggcagcaggtcgagcagggttttcagcgcgccggaataggcggctttatacacaggtgtagcgactatcagtccatcagcctgttgcagctgttcggtgaaggtcttgagtgccggactatcgaaacgagcgtaaagcagatcttccggggcgaagttttgcagattccagtgataaacctctacatccaggccatttagtttttcccgcgcatattccagcaaggagctggagcgagaaggaaagcgaggactacccgccagggtgatgacacgcatactctctccttataaccaattgttctttttttgttaacattgataacaattcggtcagtctgtcggagagacaagaaaatgccaaatataaattttgtgtatctttttctgaaaataaactaaagaaagggctttatatatcacgcatatttatttgttggatagtcattagatgttgaatcaatgaattactcgttcagttaatatttaaatattcatgaaatctataaattaaagatttgtcacttattggatttagtatgcttgatttaaatggcggtcaattattgttattattaagtctaatgtcatttaaaggcatggtgatgctgccaacttactgatttagtgtatgatggtgtttttgaggtgctccagtggcttctgtttctatcagctgtccctcctgttcagctactgacggggtggtgcgtaacggcaaaagcactgccggacatcagcgctatctctgctctcactgccgtaaaacatggcaactgcagttcacttacaccgcttctcaacccggtacgcaccagaaaatcattgatatggccatgaatggcgttggatgccgggcaactgcacgcattatgggcgttggcctcaacacgattttacgtcacttaaaaaactcaggccgcagtcggtaacctcgcgcatacagccgggcagtgacgtcatcgtctgcgcggaaatggacgaacagtggggctatgtcggggctaaatcgcgccagcgctggctgttttacgcgtatgacagtctccggaagacggttgttgcgcacgtattcggtgaacgcactatggcgacgctggggcgtcttatgagcctgctgtcaccctttgacgtggtgatatggatgacggatggctggccgctgtatgaatcccgcctgaagggaaagctgcacgtaatcagcaagcgatatacgcagcgaattgagcggcataacctgaatctgaggcagcacctggcacggctgggacggaagtcgctgtcgttctcaaaatcggtggagctgcatgacaaagtcatcgggcattatctgaacataaaacactatcaataagttggagtcattacctaaaggcattatcatatttacgaagagatcaggatgatgacgatgaaaaaaagtgtattgacggcgtttataactgtggtatgtgcaacgtccagcgttatggcagctgatgataatgctatcacggatggcaaagtaacatttaatggtaaagttattgctccagcttgtaccctggtagctgcgacgaaagattcagtagtcacattgccaaatgtcagcgccaccaagttgcaaactaatggagcagtctctggcgttaaaactgatgtaccaattgccttagaaggctgtgatgttactgtaactaaaaatgcgacgtttacctttagtggtacggctgacggcgtgcaacctacagcatttgccaaccaggctaccaccgatgcagcgacgaatgttgctctacaaatgtatctgccagatggttctacatcggtaactcccggtaccgaaacgtcgaatattcagttagcggattctgctgagcaaacagtgacctttaaagttgattatatcgctacggggaaagcgacttctggtaatgtgaatgcggtaacaaatttccatattaactattattaatagaactcattaattgttttattaattagtacccctctagtgttctggaggggatattcatattttttaagagtgactatttatgaaaacttgcataacaaagggaattgtgaccgtaagtttaacggcaatattactcagctgctcatccgcatgggcggcaggtaaaggcgggattggacttgcagcaacacgtcttgtttattcagaaggtgaagagcaaatttcactgggtgtacgtaacaccagtccggatgttccttatcttattcagtcatgggtgatgaccccagataataaaaaatcagcagattttattattacaccaccgctatttgtgctgaatccggctaatgagaatctgttacgcattatgtacattggtgcgccgttggcgaaagacagagaaacccttttcttcactagcgtacgggcagtcccttcaacaacgaagcgggaagagggaaataccctgaagattgccacacaaagcgtcatcaaacttttctggcgaccaaaaggtttagcgtatcccttaggcgaggctccggcgaaactgcgttgcacttcgtcagctgacatggttacggtcagtaacccaacaccttatttcattaccctgacagacctgaaaatagggggaaaggtagttaaaaatcaaatgatttccccctttgataaataccaattctctctgccaaagggggccaaaaatagcagcgtaacgtatcgaaccatcaatgattacggggcggaaacgccacaactcaactgtaaatcgtaagccgtcttcagttaagagagcgagatgtatagaactcatcgacaacacagcctgttaagctctggtggagtgccatcgtttattggtgggctggtggtgtttgtgtcggcagcgttcaatgcacaagctgaaacctggttcgatcctgcttttttcaaagatgatccctcaatggtggccgatttgtctcgtttcgaaaaaggacaaaaaataacgccaggggtttatcgtgtcgatattgttctgaatcagacaattgtagatacgcgcaacgtcaattttgttgagataacgccagagaaggggattgccgcctgtttgacgactgaaagcctggatgcaatgggtgttaatactgatgcgtttccggcttttaaacaactggacaaacaagcgtgtgtgccattggcggagattattccggatgccagcgtaacgtttaatgtgaataaactccgtctggaaatttcagtaccgcaaatcgccatcaaaagtaatgcccgtggttatgtcccccctgaacgttgggatgaagggatcaacgcgctattactgggatattcgtttagcggggctaacagtattcatagcagcgcagacagtgattctggcgacagctattttctgaatttaaacagtggcgttaatttaggcccatggagattgcgcaacaattcaacatggagtcgcagtagtggccaaaccgcagaatggaagaatctcagcagctatttgcagcgggcggttattccactaaaaggcgaactgaccgtaggtgatgattatactgcaggcgattttttcgatagtgtcagctttcgtggtgtgcagctggcgtcagatgacaacatgctgccagacagcctgaaagggtttgcgcctgtggtgcgtggtatcgccaaaagcaatgcccagataacgattaagcaaaatggttacaccatttaccaaacttatgtatcgcctggtgcttttgaaattagtgatctctattccacgtcgtcgagcggtgatttgttagttgaaatcaaagaagcggacggcagcgtcaatagctacagcgtaccgttttccagcgtgccattactccagcgtcaggggcgaatcaaatacgcggtgacactggcgaaatacagaaccaatagtaatgaacagcaggagagcaaatttgcctaggccacgttgcagtggggcggaccgtggggaacgacatggtatggtggtggacaatatgctgaatattaccgtgccgccatgtttggtctgggatttaaccttggcgatttcggagcaatttcgttcgatgcgacccaggcgaagagtacgctggcagaccaaagcgaacataaaggtcagtcatatcgttttctgtatgccaaaacgctcaaccaattgggcactaattttcaattgatgggctatcgctattcgacgtcgggtttctacaccctttccgacaccatgtataaacatatggatggctacgaatttaatgacggtgatgatgaagatacgccgatgtggtcgcgttattacaatttgttttacaccaaacgtggcaaactgcaggtcaatatctcccagcaattaggcgagtacggttcgttttatttaagtggtagccagcaaacttactggcataccgatcaacaggatcggctattacagtttggctacaacacgcaaattaaagatctctcgctggggggttcctggaactacagtaagtcccgtggtcaacctgatgctgatcaggtgtttgcactaaatttttccctgccgctcaatctgttgctccccagaagtaatgatagctataccaggaaaaaaattacgcctggatgacctctaacaccagcatcgataacgaagggcacattacacaaaacctgggtttaacggagacactactcgatgacggtaacctgagctacagcgtgcaacagggatataacagcgaggggaaaacggctaatggtagcgccagcatggactacaaaggggcgtttgcagatgcccgagtgggctacaactacagcgataacggcagtcaacaacaactgaactacgctctttcaggcagtttagttgcccattcacagggcattaccctggggcaatcgctgggggaaactaacgtgctgattgcagcaccaggcgcagagaatactcgtgtggcgaacagcaccgggctgaaaactgactggcgcggatataccgttgtcccctatgccacttcttatcgggaaaatcgaatcgcacttgatgcggcatcgttaaaacgtaacgtggatcttgaaaatgcagtagtcaacgtggttcccaccaaaggggcgttggttctggcggagttcaatgcccatgcgggagcaagggtattaatgaaaacatcaaagcagggtataccgctgcgttttggcgcgatagcgacgctggacggcgtacagactaatagcggcattattgatgatgatggctcgctctatatgtccggtttgcccgctcagggagcgataactgtacgctggggcgaagctcccgatcaaatttgtcatatcagttaccagcttaccgaacaacaaattaactctgcgattacgcgaatggatgccatatgcagataatctttggagaaaaatgcgtgttattactacgactattttttgccgccgtcttaatgctatggtgcgctcaaactgctgcttatagcgggcagtgtcataccactcaggggaatccgtatattggcgtcaattttggcgttaaaaccctggaggaagaagaaaatacggctggagtagttaaagacaaattttatcagtggaacgaatcgaatgattattatgtttcctgtgattgcgataaagacaatgtcagaagtggccgatgggcattcgccgcggattcaccgttagtctatttaggcgacaactggtacaaaattaatgactatcttgccgccaaagttttattgcaggttaaaggcagttctcctactgcggttcctttcgaaaacgtgggcacaggggcagatacacgatggcatatttgcgatcccggcggtcaacgtttaggtggccagggggctagcggtaatagcggtagcttttccctgaaaatattgcagccgttcgttggttcggtcgtcattcctcctatggcgctggcgcgattatttgaatgctacaacatacccgcaggtgattcctgcacgactacaggtacaccggttttagtgtattacctgtctggtacgatcaattcacttggctcatgttccgtcaatgccggagaaacaatcgaggtcgatctgggcgacgcatttgcggctaactttcgtgttgtagggcataagcctcttggggccagaacggcagaacttgcaattccagtcaggtgtaacacgggaaacgcggggttagttaacgtcaacctgagtctgacggcaaccacagaccccagctatccccaggcgattaagacgtcacgtcctggcgtgggcgtggtggtgaccgatagccagaacaacattatttcccctgctggtggaacattaccgctctctattcctgatgatgcagacagtatcgcgcgaatgaatgtctatccagtcagcacgacaggtgtaccaccagaaaccgggcgatttgaagccacggcaacggtgagaataaattttgattaacgcgtgaacgtatgaagaaaaaaacgatatttcagtgcgttatcttgttctttagcattcttaacatccatgtcgggatggctgggcctgaacaagttagtatgcatatttatgggaatgtggtcgatcagggctgtgatgtcgccaccaaaagtgcattacaaaatattcatattggtgattttaatatcagtgattttcaggccgcgaataccgtaagcactgctgctgatttgaatatcgatatcaccggttgtgccgctagtattactggcgcggacgtcctttttagcggcgaggctgacacccttacgccgacactgctcaaactaactgacacaggcggaagcggtggtatggcaacggggattgccgtgcaaattcttgatgcgcaaagtcagcaagaaatcccgctcaatcaggtccagcctcttacgcccttaaaagccggggataacacactcaaatatcaacttcgttataagtccacaaaggcgggagcaacgggcggtaatgcgacggcggttctctattttgatctggtttaccagtgaaggagtgatgttgaaacggataatctggattctgttcttactgggattaacggggggctgtgagctatttgcccatgatggcacggtcaacattagcggatcgtttcgccgtaatacatgcgtgctggcacaggatagcaagcaaatcaatgtgcagttaggcgatgtctcgctgacacgtttttttcatgggaattatggcccggagaaatctttcatcattaatttgcaggattgcggaacagatgtcagcacggttgacgtcaccttttcaggaacccccgacggagtgcagagcgaaatgctgtccattgaaagtggtacggatgcagccagcgggctggcaattgcgattctggatgatgcgaagatattgattccgcttaaccaggcgagtaaagactacagcctacatagcggtaaggtgccattaactttttatgcgcaattgcgacctgtcaatagcgatgtgcagtcgggtaaagtgaatgccagcgcgacatttgtacttcattatgactaatacgtggaacagattggcgctcttgattttcgccgttttatcgctgctggtggcgggtgaattgcgggcaggagtggtggtcggcggaacgcgatttatctttccggcagacagagaatcgatatctattttactgactaataccagtcaggaatcctggcttattaacagtaaaatcaaccgcccaacgcgttgggccgggggggaagcgtcgacagtgccagcaccattactggccgctccgccacttattctcctgaagcccggtactacaggcacgttgcgcttgctgagaacggaaagcgacatcttgcctgtggatcgcgaaacgctatttgagttaagcattgccagcgtgccatccggcaaagttgaaaatcagagcgtaaaagtggcgatgcgctcggtatttaaactgttctggcgacccgaaggtttgccgggcgacccgctggaagcttatcaacaattacgctggacacggaattcgcagggtgtacaactcactaacccaacgccttactacattaacctgattcaggtgagcgtaaatggtaaagcgttaagtaatgcgggagttgtgccgcctaaaagccagcgtcagacaagctggtgtcaggcaatcgcaccgtgtcatgtcgcctggcgggcgataaatgattacggcgggttgagtgcaaagaaggagcaaaatctgccctgaaacaggttcggaaaacgtttgcgttttttttgccgcaggtcaattcccttttggtccgaactcgcacataatacgcccccggtttgcacaccgggaatccaggagagttcatgtactaccccttcgttcgtaaagcccttttccagctcgatccagagcgcgctcatgagtttacttttcagcaattacgccgtattacaggaacgccgtttgaagcactggtgcggcagaaagtgcctgcgaaacctgttaactgcatgggcctgacgtttaaaaatccgcttggtctggcagccggtcttgataaagacggggagtgcattgacgcgttaggcgcgatgggatttggatcgatcgagatcggtaccgtcacgccacgtccacagccaggtaatgacaagccgcgtctctttcgtctggtagatgccgaaggtttgatcaaccgtatgggctttaataatcttggcgttgataacctcgtagagaacgtaaaaaaggcccattatgacggcgtcctgggtattaacatcggcaaaaataaagatacgccagtggagcagggcaaagatgactatctgatttgtatggaaaaaatctatgcctatgcgggatatatcgccatcaatatttcatcgccgaataccccaggattacgcacgctgcaatatggtgaagcgctggatgatctcttaaccgcgattaaaaataagcaaaatgatttgcaagcgatgcaccataaatatgtgccgatcgcagtgaagatcgcgccggatctttctgaagaagaattgatccaggttgccgatagtttagttcgccataatattgatggcgttattgcaaccaataccacactcgatcgttctcttgttcagggaatgaaaaattgcgatcaaaccggtggcttaagtggtcgtccgcttcagttaaaaagcaccgaaattattcgccgcttgtcactggaattaaacggtcgcttaccgatcatcggtgttggcggcatcgactcggttatcgctgcgcgtgaaaagattgctgcgggtgcctcactggtgcaaatttattctggttttatttttaaaggtccgccgctgattaaagaaatcgttacccatatctaattatttcttcgaattcctctttataagataatcagggctttattttcagccctggttgttttatattcatcgctgttgcttatttagacattttgtacttttattgttgaggttattaagcgaagcgacaatggattgtgttgctgcggttttatagggtaggggagaggcagatgcgaattaaaccagacgataactggcgttggtattacgatgaagagcacgatcgaatgatgctcgatttagccaatggtatgctatttcgctcacgttttgcgcgcaagatgttgactccagatgccttttctcccgcaggcttttgcgttgacgacgccgcgctctatttctcttttgaagaaaagtgccgcgattttaatttatctaaagaacaaaaagccgaactggtgctgaatgcactggtagcaattcgctatctcaaaccgcaaatgccgaaaagctggcattttgtttcccatggtgaaatgtgggtgcccatgccgggcgatgcggcctgcgtttggttgagcgatactcacgagcaggtcaatttgctggtcgttgaatctggcgaaaatgccgcactatgcctgctggcacaaccctgcgttgttattgcgggtcgcgcgatgcagttgggcgacgccattaaaatcatgaacgacaggctgaaaccgcaggttaatgttgacagcttcagcctcgaacaggcagtctaacgcgccaacttaagtgcagtcttcggtacacagctacagcaaagaatggtgccatcatcgcccattgctgattttttcagcggcgtgacttcgccttctaaaagctgaacacggcaacttccacaaatgcccgcgcggcaagaataagggatacgaattccctgattttctaattgctccagcaacacctgttggttatttccacgaaatgcctgtccctgccagtcaatatctacatttgcgtccggttgttgcgtgatgttggcggtatcatcagcggcagctgcgccgtaaatttttgccggagccgttgccagaatttccacctcatcgccaacgcgaatcacgccgctattacgggcaattaaattctgaccaaaatcgacatcgccgttatcctgggcagtgcggaaagattgcaatgtttttaatggttcgcctgccggatgtttttgccctttttctgggctgacggtggtgaaaatacagcggctacaaggtttaaccacatcaaacaccacatcaccaatgcgaatcactttccagcgatcttcttcccaggctgacgcgccggaaaccaccagattggggcggaattgctccatttttacactggccggacaacgttgttggagatcacgtaacgaggcttcgttagcaagaaggtaaggatagccatcagcaaatgacagaggtacagtgttgtggcgtttcacgcgccgggtcatttgtggccccacccagcgtaattgcacttcgcgggagaaaaatccacttagccatttgttgatcgcgtctggcgcaattcgcgcggtaaaatgtgtgccccaaacttcggttggtgcgtcttgtgtggcgaaatcagcaaaacgaacatatgcgctactgccatctggtgcggtgagatgcaagccatcatgcacaggtgaaggagtaaaccgtaccatctggggaaactggcgagcggtaataaacgtaccgtcaggttccgtgatcataaagatgcgatcgaaggccagaccactgacatcagccagagcatgtgtaagaccaatgccgcgcatcgatttaacaggatgaataaaaagccgggttaatgtcgccacggtgcggtcctcaaatgaaaataagccctcaactttatgacatgacgcgcttattagctataatgcgcaacaattttcttagcgcctgtcccattaggctattttatttgtcagtttggccctgggttgtgctcgaaatcctcacgtacttgtgtacgctccggtttctccgcgctgtccatgtccagactgactgcaacaattacgcctactgcggtaggctcttagagtaaaagtgacgatatgaattctctgtttgccagtacggcccgtgggctggaagagctgttaaaaactgaactggaaaacctgggggccgttgaatgccaggtggttcagggtggggtccatttcaagggcgacacacggcttgtttaccagagcctgatgtggagccgcctggcctcgcgtattatgttgccgctgggcgagtgtaaggtttacagcgatttagacctctatctcggtgttcaggcgatcaactggacagagatgtttaatcttggcgcgaccttcgctgtccacttcagtggtttgaatgacaccatccgcaacagtcagtacggcgcgatgaaagtgaaagacgcgatcgtcgatgctttcacgcggaaaaatctgccgcgtccaaatgttgatcgcgatgcgccggatatccgcgttaacgtctggctgcataaagaaaccgccagtatcgctcttgatctgagtggtgatggtttacatctgcgtggctatcgcgatcgtgctggtattgcgccgatcaaagaaaccctggcagccgctattgtgatgcgaaccggctggcagccaggaacaccgctgctcgatccgatgtgtggttccggtacgttgctgattgaagcggcgatgctagcgaccgatcgcgcaccaggcttgcaccgtgggcgttggggctttagcggctgggtgcagcatgatgaagctatctggcaggaagtgaaagcggaagcgcaaactcgtgcccgtaaaggcctggctgagtatagctctcatttttacggttcggacagcgacgcacgggtgattcaacgtgcgcgcactaacgcccgtcttgcggggattggtgaactgatcacctttgaggtgaaagatgtcgcgcaactgaccaatccgctgccgaaagggccgtacggcacagtgttgagcaacccgccatacggggaacgtctggacagcgaaccggcgctgattgcgctgcatagcctgctgggtcggatcatgaaaaaccagtttggtggctggaatctctctttgtttagtgcctcgccggatctgctaagctgcttgcagctgcgtgcagacaaacagtacaaggcgaaaaacggcccgctggactgcgtacagaaaaattaccacgttgccgaaagcactccagacagcaaaccggcgatggtagcggaagactacgccaaccgcctgcgtaagaacctcaaaaaattcgagaagtgggctcgccaggaaggaattgaatgttaccgcctgtatgacgccgatctaccggaatataacgttgccgttgaccgttatgccgactgggtggtggtgcaggagtatgcgccgccaaaaactattgatgctcacaaagcgcgtcagcgtctgttcgatattatcgctgcaaccatttcggtactggggattgcgccaaacaaactggtgctgaaaacccgtgaacgccagaagggcaaaaaccagtaccagaaactgggcgagaagggcgagtttcttgaagttaccgaatataacgctcacttgtgggtgaacctgacggattatctcgatactggtctgttcctcgatcaccgtatcgcccgccgtatgctcggtcagatgagcaaaggcaaagatttcctcaacctgttctcttataccggtagcgccaccgtgcatgcgggattaggcggcgcgcgcagcaccaccaccgtggatatgtcgcgtacttatctggagtgggcagaacgcaacctgcgtctgaatggcctgaccgggcgtgcgcatcgcctgattcaggccgattgcctggcgtggctgcgtgaggcaaatgaacagtttgatctgatctttatcgatccgccaaccttctctaactcaaaacgaatggaagatgcgtttgatgttcagcgcgatcatatggcgctgatgaaagatttgaaacgtctgctgcgtgcaggtgggacgatcatgttctcgaacaacaaacgtggcttccgtatggatctcgacggcctggcaaaactgggactgaaagcacaagaaattacgcaaaaaacgctctcccaggatttcgcccgtaaccgccagatccacaactgctggctgattaccgcagcctgaaaggaatagtaatgtcattaatcagtatgcatggcgcatggctgtcgttcagcgacgcgccgcttctcgataacgcagaactgcatatcgaagataacgaacgtgtttgtctggtgggtcgcaacggcgcgggcaaatcgacgttaatgaaaatcctcaaccgtgaacaagggctggatgacggtcgcattatttacgagcaagatttgattgtagctcgtctgcaacaggatccgccgcgtaacgttgagggtagcgtttatgatttcgttgccgaaggcattgaagaacaagcggaatatctgaaacgctatcacgatatttcgcgcctggtgatgaacgacccgagcgagaaaaatctcaacgaactggcgaaggttcaggaacagttggatcaccacaacctgtggcagctggaaaaccgcatcaacgaagtgctggcgcaactggggttagatcctaatgttgcgctgtcgtcgctttccggcggctggttgcgtaaagcggcattaggacgcgcgctggtgagtaatccgcgcgtgctgttgcttgatgaaccgacaaaccacctggatattgaaaccatcgactggctggaagggttccttaaaaccttcaatgggacgattattttcatctcccacgaccgttcgtttatccgcaatatggcgacgcgcattgttgatctcgatcgcggcaagctggtgacctatccagggaattacgaccagtacctgcttgaaaaagaagaagccctgcgcgtggaagaactacaaaatgccgagttcgatcgcaaactggcgcaggaagaggtgtggatccgccaggggatcaaagcacgccgtacccgtaatgaaggccgcgtacgcgccctgaaagcaatgcgtcgcgagcgtggtgaacgtcgcgaagtgatgggtaccgcaaagatgcaggtggaagaggccagccgctccggtaagatcgttttcgaaatggaagacgtttgctaccaggttgacggtaagcaactggtgaaagatttttcggcccaggttctacgtggcgacaaaattgccctgattggtccgaatgggtgcggcaaaaccacgctgctgaaactgatgctcggtcagcttcaagcggacagcgggcgtattcacgttggcaccaaactggaagtggcttatttcgatcagcaccgcgcggaactggatcccgataaaacggtgatggataaccttgccgaaggtaagcaagaggtgatggttaacggcaagccacgccacgtattgggctatttgcaggactttctgttccatccgaaacgggcgatgacgccggtacgtgcgctttctggcggtgagcggaaccgcttgctgctggcgcgtttgttcctcaaaccaagcaacttattgattcttgacgaaccgaccaacgatcttgatgtcgaaacgctggaactgctggaagaactgatcgacagctatcagggcacggtattgctggttagccacgatcgtcagtttgtcgataacaccgttacagaatgttggatcttcgaaggcggcggtaaaattggtcgttatgtcggcggttatcatgatgcccgtggtcagcaagagcagtatgtggcgctcaaacagcctgcggtgaaaaaaaccgaagaagccgccgcggcaaaagcagaaactgtaaaacgcagcagtagcaaactaagctataaattgcagcgcgaactggagcagctaccgcaattgctcgaagatctggaggcgaagctggaagccctacagacgcaggtggcggatgcttccttcttcagtcagccacatgagcagacacaaaaagtgctcgccgatatggctgctgcagagcaggagctggagcaagcctttgaacgctgggagtatcttgaagcgttaaaaaatggtggctgatcgcaaaatagtcgatttaaacagagacagctgacaacggtaaaattgcctgatgaactgggtttatcaggcatgaaaaccaacactttgttagtcatctgtaaaatagcgcatcattaaggagtaccaatgtgcgaacatcatcatgccgcgaagcacatcctgtgctcgcagtgtgacatgctggtggcgttaccgcgccttgagcatggtcagaaagcggcatgtccccggtgtggcacaacgttaaccgtggcgtgggatgcccctcggcagcgtccgaccgcctatgcgttggctgcactgttcatgctgttgctgtccaacttgtttccttttgtgaatatgaacgttgcaggagttaccagtgaaattacattactggaaattcccggcgtgcttttttctgaggactacgccagcctcggcacctttttcctgttgtttgtgcaactggttcccgcgttttgtctgataaccattctgttactggtgaatcgcgcggaattaccggtccgtttaaaagagcaactggcacgggtgctttttcaactcaaaacctggggaatggcggagattttcctcgctggtgtgctggtcagtttcgttaaactgatggcttacggcagcattggggtaggcagcagctttctcccctggtgtttattttgtgtcctgcaactgcgcgcttttcagtgcgttgatcgtcgctggttatgggacgacatcgccccgatgccagaactgcgccagccgctaaaaccaggcgtcacggggatacgtcaggggctgcgttcgtgctcctgttgtacggcaatccttcctgctgatgaacccgtgtgcccgcgttgtagtaccaaagggtacgttcggcgtagaaacagcctgcagtggacactcgcgctgcttgtaacgtccatcatgctgtatcttccggctaatattttgcccatcatggtgacggatttattaggctcgaagatgccgtcgacgattctcgctggggtcattctgttatggagcgaaggctcttatcccgtcgctgcggtgatctttctggccagtattatggtgccaacgttaaagatgatcgccatcgcgtggctgtgttgggatgccaaagggcatggcaagcgcgacagtgaaagaatgcatttgatttatgaagttgttgagtttgtaggccgctggtcgatgattgacgttttcgttatcgcggtgctctcggcgctggtgcgtatgggaggtttaatgagtatttatccggcaatgggtgcattaatgtttgctttagtcgtcataatgacaatgttttctgctatgacgtttgacccgcgtttgtcgtgggatcgtcaacctgaatcagagcatgaggagtcctgacagtatggaatctaataatggggaagccaaaatccagaaagtgaagaactggtctcccgtgtggatatttcctatcgtcacggcgctcattggggcctgggttcttttttatcattacagccatcagggactggaagtgaccctgatcaccgcgaatgcggaaggaattgaaggtggcaaaaccaccattaaaagccgtagcgttgacgtcggcgtggttgaaagcgccacactggctgatgatttgacgcacgttgaaatcaaagtgcggctgaattctggtatggaaaaattgctgcataaagacaccgtcttttgggtggtgaaaccgcagattggtcgcgaagggattagcggcctgggaacgctgctgtctggagtttatatcgaactgcagccaggcgcgaaaggcagcaaaatggataaatacgatttgctggactcgccaccgttggccccgcctgatgcgaaaggtatccgtgtgattctcgatagcaaaaaagccgggcagctctcgccaggagatccggtgctgttccgtggctatcgggtaggttcggttgaaaccagcaccttcgatacgcaaaaacgcaatatcagttatcaactgttcatcaatgcaccttatgaccgactggtgaccagcaatgttcgcttctggaaagatagtggcattgcggttgatctgacgtcagcggggatgcgtgtggagatgggctcattgacaacgctgcttagtggcggtgttagctttgatgtgccggaaggtctggatttagggcagccagtggcaccgaaaacagctttcgttttgtatgatgatcagaagagcattcaggattcgttgtacaccgatcacattgattatctgatgttctttaaagattcggtacgcggtctgcaaccgggagctccggtagaattccggggtattcgcctgggtaccgtaagcaaagtgccattctttgcgccgaatatgcgtcagacatttaacgatgattaccgtattccggtactgattcgtatcgagccagagcggctgaaaatgcagcttggcgaaaatgcggatgttgttgagcaccttggcgaattgttgaaacgtggtttacgcggatcgctgaaaaccggaaacctggtcactggtgcactgtatgttgatcttgatttctatccaaatacgcctgcaataaccggtattcgtgaatttaatggttatcagattatcccgactgttagcggcggcctggcgcaaatccagcaacgactgatggaagcgttggataagatcaacaaactgccattgaatccgatgattgaacaggcaaccagtacgctttctgaaagtcagcgcacaatgaaaaacctgcaaacgacgctggatagcatgaacaagatcctcgccagccagtcgatgcagcagttgccgacggatatgcagtcaacgttgcgtgaattgaatcgcagcatgcagggcttccagcctggctccgcagcctacaacaagatggtggcggatatgcagcgccttgatcaggtgttgcgagaactgcaaccggtgctgaaaacgctcaatgagaagagtaacgcgctggtatttgaagcgaaggacaaaaaagatccagagccgaagagggcgaaacaatgaaaaagtggctagtgacgattgcagcactgtggctggccggatgcagctccggcgaaattaataaaaactattaccagttacctgtggtgcagagcggtacacaaagtaccgccagccagggcaatcgtctgttatgggtagagcaggtcactgttcctgactatctggcggggaatggtgtggtttatcaaaccagtgatgtgaagtatgtgattgccaacaacaacttgtgggccagcccgttggatcaacaattgcgcaacaccctggttgccaacctgagtacgcaactgcccggctgggtggttgcctcccagcctctgggaagcgcccaggacacgctcaatgttaccgtaacggagtttaacggtcgctatgatggcaaggtcattgtcagtggtgagtggctgttgaaccaccagggacaactgatcaaacgtccgttccgtctggaaggagtgcaaactcaggatggttacgatgagatggttaaagtactggccagtgtctggagtcaggaagccgcttctattgcgcaagagataaagcgtctaccttaattataaagatttgtaaatataaccgtctccggtatgttgcctgaggcggtttttttgtttctaacgtgcggaaaaagttgttcctctttacattttttgtacaaccgacatacccgtgtagctcacaaatatgacagtggcgtgaattttgcgcattgacggcagttatgattcgcggtattgcttaactgtgattgcacatttagtaatcactgttttcttttccaccagaaaccagtatgagggaaacgaggcatgaagagacaaaaacgagatcgcctggaacgggcacatcaacgtggttatcaggccggcatcgccggacgctcaaaagaaatgtgtccctatcagacgctgaatcaaaggtcacaatggctgggaggctggcgagaagccatggcggacagggtagtaatggcctgattctgtctctttaaaaagaaacctccgcattgcggaggtttcgccttttgatactctgtctgattataatcagaaggcagaagtatcctggaacagaccgactttcaggtcgctggcggtatagatcaaacgaccatcaaccagcacttctccatccgccaggcccataatcagacgacggttaacaatgcgtttaaagtgaatacggtaggtcacttttttcgctgtcggcagtacctgaccagtgaatttcacttcgccaacgcccagtgcgcggcctttaccttcgccgcccagccagccgaggtagaaccctaccagctgccacattgcgtccaggcccaggcatcccggcataaccggatcgccaataaagtggcatccgaagaaccacagatccggattgatatccagttctgcttcaacataccctttgtcgaagttaccacccgtttcggtcattttgaccacacggtccatcatcagcatattcggtgctggcaattgcgggcctttagcgccaaacagttcaccgcgaccagaggcaagaaggtcttcttttgtataggattcgcgtttatctaccatgttctctgtaagccttattttattgaagcacgcaggatagctaacacgtgtacgctgaacaagtccgatcagttcggaataaaccagttcagccaacgtaatggccatggaaaacggtgacgtccttcctgttgcgatgcttgcgcgatacgttcctggatggtttgcatcagcgtcgtttggccttcgccatcccacaccagatttaataataacggcagtgcgtcagtcacatcgtctactgcccagatggtgaatttgccttcttctaccgctttcactagttcactgtgaagacttaaatggcgaacgttagctgtggggataatgacaccttgtttcccggttaactcacgttgctggcaaatagcaaagaagccttcgattttctcatttaaaccaccgaccggctgggcgcgaccgaactgatcgactgaacctgtgatagcgatactctgattcaccggcacatcggcgagggcgcttatcagggcgcagagttcagccatcgaggcactatctccatcaacttcactgtatgactgctcaaatgtcagcgatgctgagaaggggatctgttgctcaagctgtagttccgacatcaggaacgcttgcatgatcatcatccctttcgcatggatattgccgccaagctccgctttgcgttcgatgtcggtgaattcaccatcgccaatatgcacaacgcagctaatgcgagaaggttcgccaaaagcgcgtggatgacccggaaattcaatgaccgaaagggcgttaatttgcccgatgcgttcgccttcggtttcaatcaggatttgctcctgaaggatctcatcctgcatacgttcagcgaggaaaccttcgcgccattcacgctgctgcagcattaagtttagctgctcgccggagaaggtgtcgccatcacacagggaggcgacctctttacactggcggaggatccactgcgggctaagcggaagtgtttcttgttcaccggtgtagcgtgctgcttcgcggataagtaccggccaggcatccgctcccggtgcaggtaagtgattatgtctggcggtaaatgtcacccagcgacaccactgggttactgactccgcatcgacaatctgcagagtatcttcaaattcgctataaatagcctgctctgaaagctctggctccatctcctggaaatcagccaatgattcgcgttcgcctaccagaatgactttcagcttcaatggcatcgaaggcacagagacggggagagggcgcgactcatcaaacgcaacccagtcaaaacgctcgcggttaacgatatttttcagccgcatccacagcagaggttgcgccagcagtgtacgcaaagagatgatgagaataccgccatttgcctgatgcaccagaccaggctgcagggtaatgtcgccattaaactggcgcaggcagccaaagagttgctccgcttctacccagtcggcagcgacaacttgcgttaaagtcgcaaaattatcatctgcactcactgcgtgacgtaagcggatggagtggccggaaacctcatagtgaccgcccaccagttggcctgcatcgctttgtagcgtacgcgcggcattggcaataagattcagatactcagactcttccggggccttcgccagcataaaagaggaggatgctcgcgtatgcagcaactgctccagcgcaaattgcagccgcggttgagtatcactgaataaaggatcgttttcgtcaatcaaatgtggctgagcaaatatttcctgatagctatcggtatcaggaaccaggtcacgccatgcaagtttcgtaatggtcaaagttgatgttttttagtctgttgtcaaagccgcgattataccgtaaccggcactacagcacacgtagaaagcaccgacaatactccaggcatgggcgttaaagctcacaggatggagattcttttcttcactggcctaaaaagctgatattctgtaaagagttacacggtaacattgagatcgctatgaaatatcaacaacttgaaaatcttgaaagcggttggaaatggaagtatctggtgaagaagcatcgcgaaggggagttaatcacccgttacatagaagccagtgccgcccaggaagccgtcgatgtgttgctctcgctggaaaatgaacccgtgctggtaaatggctggattgacaagcatatgaatccggaactggtcaatcgcatgaagcaaaccattcgggcaagacgaaagcgccattttaatgcggaacaccagcatacgcgcaaaaaatcgatcgatctggaatttattgtctggcaacgtctggctggtcttgcgcagcgtcgcggtaaaacgctttctgaaacgattgttcagctgattgaagatgcggaaaacaaagagaaatacgcgaataaaatgtcttctctgaagcaggatctgcaggcattgctgggtaaggaataactgacgaaagtcagttcaatttactaaaggcaaaaaaaaccccgcagcagcggggtttttctaccagacgagaacttaagcctgcggctgagttacaacgtctttgatacctttaacttcgatctctacgcgacgatccggagccaggcagtcgatcagtgcagcacgctgtttcacgttgtcacaggtgttgccagtaaccgggttggattcgcccataccacgtgcggagatcttgtctgccgggatacctttggagatcaggtaatcaacaacagactgagcacggcgctcggacagaccctggttgtaagcgtcagaaccgatgcggtcggtgtaacccagaacaactacggaaccgtctttcggatccaggttgctcagctggctgtacagctgatccagagcagcctgaccttccggtttcagggttgctttgttgaagttgaacagaacgtcagacttcagagtgaagtgcttggtctgtacttccggtgccggagctggagccggagcaactactggagctgcttcgccctgaccgaaacggtaggaaacccccaggctcagcatgccgttgtccggacgagtgccgatggtgtgtgcgtcaccgatgttgttggtccactggtattccagacgggtagcgatttcaggagtgatcgcgtactcaacaccgccagcgaagaccggagaaacgccggtgtcgtggtttttaccataaacgttggatttagtgtctgcacgccataccataccacccagacgagtgtagatgtccaggtcgtcagtgattgggtaacccagtttagcggtcagttgaacgccctgagctttgtatgcaccgttttcaacgctgcctttgtacggcatacgacctaaccagtcgtaacccatttcaaagccaacatacgggttaacctggtaaccaccaaaagcaccagcgcccagttggttttcatgggtcgggccattgttgttgatgaaaccagtgtcatggtactgggaccagcccagtttagcaccagtgtaccaggtgttatctttcggagcggcctgcgctacggtagcgaaaccagccagtgccactgcaatcgcgatagctgtctttttcattttttgcgcctcgttatcatccaaaatacgccatgaatatctccaacgagataacacggttaaatccttcaccgggggatctgctcaattaactctaccgatatcttcggcttatgccgagcacccctggcgatgtaaagtctacaacgtagttgaaaacttacaagtgtgaactccgtcaggcatatgaaaaaaaagtcttgtataaggtatgtttaatcttttttgtcagcgacaatttacagaagaaaatcgcggaaaccgcttcagacaagcctccgcaaggaaaattagtcacgactgaaagcattggctgggcgacaaaaaaagttccaggattaatcctaaatttacttaatgatacaaattagagtgaatttttagcccggaaagttgtctcgtggcgtgagaggatgcgcttaccggacgcataataaaccccatagcgttaccttcatttgccgcatcaacaagttcagcatgctcttcttcagtcaaatcatctgccaaccaaccgatcaccacactgtaattgcccgtgcgtaaagcgcgaaccattgactccacagtgtggcaaggggagagctggctaatctgcattactttcgttaagggtagcccagatgcctgaacccattcccgactcagtttttgttgcggtgttaaccagagttgccagcgcgattgctgaccgagttgctgtaacaatggcaacagtagaagttgcgtcatcatgggctgatcttcgcgatagacaacttcactgataagcccggctgtagtgttttccgtagagacacgcgcaattttacttgctgcggatgagaacgacgaagaacgatgtgcatagcctgaagtgtacataatcaatccagcccctgtgagttactgtatggatgtacagtacatccagtgacaacaaagatcaaccctattttcggaaagagcctcgcaaattttgtcgttggtgacgggaaaacataaattaatcttgccccttaagaataagttgcctattttcgtagttaacggatccgttaatgtgaatcattcttttatgttatgattttaaaaggaattttatgaaaagcctctcctataagcggatctataaatcacaagaatacctggcaacgttgggcacaattgaataccgatcattgtttggcagttacagcctgaccgttgacgacacggtgtttgcgatggtttctgatggtgagttgtatcttcgggcttgtgagcaaagtgcacagtactgtgtaaaacatccgcctgtctggctgacatataaaaagtgtggccgatccgttaccctcaattactatcgggttgatgaaagtctatggcgaaatcaactgaagctggtgcgtctgtcgaaatattctctcgatgcagcgctgaaagagaaaagcacgcgcaatacccgggaaagactgaaagatttgcccaatatgtcttttcatctggaagcgattctcggggaggtggggattaaggatgtacgggcgttacgtatacttggggcaaaaatgtgttggttgcgactgcggcagcaaaacagtctggtgacagaaaagattctgtttatgcttgaaggtgccattatcggcattcatgaagctgcgctcccggtggcacgccgccaggagcttgcagaatgggctgactctcttacgccgaaacaggagtttcctgcggaacttgagtaatctggcgttgcagacgaccaatctcaggcagtaatgcaatcaataatccaacttgttgtacgaccagaggttctttgctgtctgcccgtggttcaagttgctgcatccgctgtttcaggctagctaatgcctcattgacgcgttcttcatcagcaggttgatgatgtaacgcgtcatcaacatagcaaactgcgtcatcaagaaacgccagaatttcaggattagttaactgctcccggtgagcaccgagggctgagatatagctggtaaacgtatggttaaggcacagcaaccgaaacgcggcttcgcgaatttgcggggtaacgttcggctcgctggacatatttgataccaccgacgccagctcagcatcacggttgtgtgcatcgcggcgggcaatacgatacgccagacggttatcacgcccctgatggtattgctccagtatggcatcgagataccgacagttggcctctgtggcgcgttcgagcatgcgcggcagattgcgaaactgccagtcaggccagatgtagctcactgccgcccacgcaatggcacaaccaatcagcgtatcgattacgcgaggtaacgctacttcaaaaccttcacccagtaagttaaaacacagtagcaccaaaagtgtgatgaacatcgttgcatgagcgtattgcacgttacggaaggcaaaaaagagcacgccggtaataaccagcagcaccagctgcccttccagtgatggcacaaaccacagcacaggaatgccaatggcgatacctaccagcgtaccaataatccttaacttcaggcggtggcgcgtggcgttatagtttggctggcagacaaacaaacttgtcagcaagatccaatacccgtgatgcattccggttatctgaatgatggcgtagccgaagcacaacaccagcgacattcttaccgcatgacggaagagggcggattccggcgtgaagtgacggctaagacgcagccagatatcactcaacccgtgcgggctgtcatcagcgagctcattttcgtcattattatggggtagtgcctgggcctgttctgattcaattgttgccagttgggcatcaatggcgcgtaaattgttcagcaaaaatcccagtgttttgagtaaatcggcgggtgcgccgttatcgcgcatccgctccagcgcagcatcaatatgcgtaaaagcgcgctcaaaatgcggatcatgttgataaggctgacgcaacaaaatacagcgtgacagttgctggcacgcctggccctgcatcgacatcagccgctgaaaacggaacagcacgtcgctgtggcgaaaatgttcacgcaatgtttgatactgaatatgagaagagctggcacgctcgtgaatatcctgtgcgacaaagtaataatgcagcgtgcgacgcgttccccgttgaccacgatcgccacgtaagcgggtcagcagcgagagtttcgtctgattcaatgtcgccatcagcagaccgttggcgagagccaaatcgtacagcggtgcctggctttcatcttcaatatcaggatcaaacatgcgcgacttgagctcaagataacgcgccagttgttcatagcaacgcgccaggttgtcctgcagcgggcggaccgggaacagcagatgaccaataagtgtcaggacgttgtaccagacggcaccggccagcagatacatcggctgctgataccagtgctcatacagtgatgttcccaacatagtgtaaatggcgatcagcaatgcaccgaaggcaattgttgcatagcgttgacccagaccgccgagcaaaatgaagccgctggtagagagcgttaagccaatcgcaaatagccagggccagggaaacagcaattctactgaggccgaggcgataaaaaagcagaacagcgtaatgatgaggttacgcaaacgtcccgccagtcggtcatcgagatcggtcagcgccgctgccaccatccccagcgttagcggaatcgtcagttttacatcacccagccaccacggaaacgctgtggttccacaaagcgcaataaaaatacgcgcgtaatacagccaggcgctgttccaggtatagcgtttgagcaaaggacttagcataaaggccatattagtggattattcaaaacgacgacgtgcattggcttcacgcgcagcttgcgctgtttctaccgataccacgcgacgaccaaccggccatagtgcaatagcggcaattttaaagttcgcaatgccgacaggaatgccaatgattgaaatacattgtgcgatgcccgttgcaatgtgcatcaggcataaccaccagccaaagaaaatcagccagaaaatattcaataccgtaccgccagtattcagcagcacatttttgccagccgggttcagttcatcgacatgaatagcttcattgccataaggcaccagagatagtttagtgatctcccagcaggatcgtgtcagcggtaaggtaaaaatcagcacaatactgaccagagtcgccaacagccagcccagagtggtggcaaatccgccaagcacaaagttcagaatgttcaaaacggtacgcataaaacctcgctttactgtggttttcagtaatgggcggcaattgtaacgtttttttgggctggagcacgttttctctgacggttacactgataagaaataatttcgtgtggatctacagagtcatggaactgaaagcgacaacgcttggaaaacgtctggcacagcacccttacgatcgggcggtgatcctcaatgccgggattaaagtctccggcgatcgccacgaataccttattcctttcaatcaattactggcgattcactgtaagcgcggtctggtatggggcgagctggaatttgtactgccggacgaaaaagtggtgcgtctgcacggcaccgaatggggcgagacgcagcgtttttaccatcatcttgatgctcactggcggcggtggagtggcgagatgagcgaaattgcgtctggtgttttacgccagcaactggatttgattgccacgcgcactggagaaaataaatggctgacgcgtgagcaaacctctggcgttcagcaacaaatccgccaggctttgtcggcgttgccgttgccggttaaccgactggaagaattcgataactgccgtgaggcgtggcgtaaatgtcaggcctggttgaaagatattgaaagcgctcggttgcagcataaccaggcgtataccgaagccatgcttaccgagtatgcggattttttccgccaggtcgagtcttcaccgctgaatccggcgcaggcccgggcagtcgttaatggcgagcattctctgttagtgctggcaggtgcaggaagcggaaaaacgtcggtgctggtggcccgtgcaggctggttgctggcgcgtggtgaagcgtcccctgagcaaattttattgctggcgtttggtcgcaaagccgctgaagagatggacgagcggattcgcgaacggctacataccgaagacattaccgcacgcacgtttcatgcgctggcgctgcatattattcagcagggcagcaaaaaagttccgatagtcagcaaactggaaaatgataccgctgcccgtcatgaactctttattgctgagtggcgcaagcaatgcagcgaaaagaaagcgcaggcgaagggctggcggcaatggctgacggaagaaatgcagtggtcagtgccagaaggtaacttctgggatgatgaaaaattacagcgtcgccttgcctctcgcctcgatcgctgggtaagtctgatgcggatgcacggtggtgcacaggcagaaatgattgccagtgcacccgaagagattcgcgatctgttcagtaaacgtatcaagttgatggccccgttattaaaagcctggaaaggtgcgctgaaggcagaaaacgctgtcgatttttcgggccttattcatcaggcgattgtgattctggagaaaggtcgctttatcagcccgtggaagcatattctggttgatgaatttcaggatatctcgccgcagcgggcagcgttgttagcggcattacgcaagcaaaacagtcagacgacgttgttcgctgttggtgatgactggcaggcgatttaccgattcagcggtgcgcaaatgtcgctcaccaccgctttccatgaaaactttggtgaaggcgaacgttgtgatttagacacgacttaccgttttaacagtcgtatcggtaaggtggcaaaccggtttattcagcagaacccaggccagctgaaaaagccgctaaacagcttaaccaatggagacaaaaaagccgtcacgttattggatgagagtcaacttgacgctttgctggataagctctctggttatgccaaaccggaagagcgcattctgatcctggcgcgttaccatcacatgaggcctgccagcctggaaaaagcggcaacacgctggccgaagttgcaaatcgactttatgaccattcatgccagcaaagggcaacaggcggattacgtcatcatcgttggcttgcaggagggaagtgatggttttccggctgcggcgcgggagtcgattatggaagaggcgctactgccaccggttgaggatttcccggacgctgaagaacggcggttaatgtacgtggcgctgacccgggcacgccatcgggtatgggcactgtttaacaaagagaatccctctccctttgtggaaatactgaaaaatctggatgtgccggtggcgagaaaaccgtaagaaacaggtggcgtttgccacctgtgcaatattacttcagacggtccgcgagataacgctgataatcggggattagaatatcgaccgcgtcgttgaaatgcggcgactggattatgaagtctgccgttgccacgttggtggcgaccggaatgttccataccgtcgccagacgcagcaaggctttcacgtcaggatcgtgcggcacggcatttagtggatcccagaagaaaatcaatacatcaattttcccttctgagatcaatgcgccaacctgctggtcaccccccattgggccactcaacatcgcgttgacgttcatgccggtcgcgcgggaaattaagttaccggtagtgcctgttgcatacagtacgtgttgttccagtaacggttgatgccgttccacccagctcatcagcatttgtttgcagtgatcgtgtgccaccagcgcaatatgtttccgcgcaggtaaagtgcgagtcgtcagttccataatgtacatccgtagttaactttcctacagattactgtaagcacttatcgctgcaagataaagaccgaaaaagcctgcgcacaggcacaaaaatctcaggaagatggttgtttttccgcccactgcaggaaagtatttcgcgtttgtgggtcagccagtttaaaccaatacttcagccgttgttctgtgagcacctgagactgcggtggaatagcatccagctcggaaacacccgaaagcagcgtactgtcatctgccatcatcgtggcaaattgcggtagtgaagcgcgtttcgcggatttgttatagcgttcaacctcgacctcataatcaatcgtttttgccgttgaggtaatggcgagaatatccagctttaccggaatcggcgtcgcatcgccatccaacaattcaaggcgcggcgcggcatcaaaatggttagcttcccgctcattctccaggcgaggcaggcgaaaattgacctggttgatgagctgggtattaaaactgaccaccagcggtggggagatatacagccgttcttcactattggaaagatgaatcgtcttctcaacgcgaaacactaactgatgcggtccattatccagttcaatgctgtccgcaccgcgcagcagagagctggaaaccttcttgccgtcgagtaccagaagatcgacatcggttgaaagccgcagcgtggtggcaaaaacggataccggcaaacataatgcaattaaggtggtcacgatgccggttttcataggtagctcctgtcaaaagaccgcccgaataataatgtgtcaaaatttttctttaatcatacttactaacatatagacatatttcccgcttttgctctcattcattcgtattagctgcatggttggcatgtcggctttgtcgtacactttgttaaacagtctggaggaaataatgaaagaaaccgatattgcaggcattttaacgtccactcacaccattgcgctggtgggggcaagcgacaaacccgatcgtcccagctatcgcgtgatgaaatatctactcgaccaggggtatcacgtcattccggtttcgccaaaagttgccggcaaaacgctgctgggccagcaggggtatggcacgctggcagacgttccggaaaaggtcgatatggtcgatgttttccgtaattcagaagcggcgtggggcgtggcacaggaagctattgccattggcgcgaaaaccctctggatgcaactgggggtgattaatgagcaagcggcagtactggcacgggatgccgggttgaatgtggtgatggatcgctgcccggctattgagatccctcgcctgggcctggccaaataaaaaatccccggaaggcaaaaaccttccggggattcgttcagggatcagttacgcagacgcggggcctggagttgtttgcggatggtctgcgccagctcatccatggatggctgttcaggatgttcatcctgcaattcgctacttagctgggcttcagccaggtaggtatgaaccggtaggccgttatcgtcctccatcactacgtgataccacggagcggcgcgaagctcgtcatttaccgccagctcatcaggcgacggttcagagagcgaataaaccgggtcgatatccacgaccactccgagataacctaacagggaatggcggacctgctggccgataccgaatttgctggcaatcatagtcacctcccgggaaatctttacctttgatataagggtaaaattccacatttcaagttacatgacgcgacaggcaaaccctttcagatatagcccttccggataggtagcgatcaccggatgatcggctgcctgacggaactgctctataaattgtacatcacggccggcatcaattgcggcatccgcgatgattttctgaaataaatcgctggtcatcagaccggaacaggagaaagtcaggagaataccgccttcattcagcaactgaatcgccagcatgttgatatctttatagccacgacacgcgcccatcaactggcttttattctcaacaaacttcggcgggtccatcacgataacgtcaaatttttcaccgcgatcgcgataagtacgcagcaatttaaagacatcatcacggacaaactcagccttgctcagatccagtttgttcagctcaacgttctgccgtgcaatatccagcgcttcctaggaggtatcaacgctgacaacctggctgcaaccgcccatcagtgccgatacggcgaaaccaccggtataggagaaacagttcagcacacgtttattttcaacgtagcggcgggtagccaggcggctgtctcgctggtccaggtagtagcccgttttgtgtccgtgctgaatatccaccagcagcttcatgccgtgttcttcaatcggcagcagggcaggcggcaactcgccggtgacgaggccctgggtcagctccatcccttcttttttacgtaccgcaacatcgctgcgatcgtaaatcgcacattccgggtacagcgtttgcagggcactaattaatgccgcgcgctgatattctgccccagcactcagcagttgcagcaccagaaaattaccgaaacgatcgatagtaatacccggcaggccatcagattctccggcgattaaacgatagctgtcgaggccatctttttgcgccagtcagtcacgccatttttgtgcttgttgcaaacggcgggaaaaaaaagcaatgtcgatagactcagacgggtcaaacgtccagacgcgcgcccggatttgcgaagctggcgaataagcgccgcgtgctaaccattttccctgatgatcaacaatatcgatggtttcaccgaggctggctttaccttccatgcgggcaacggccccggaaaagacccacggatggcgacgaagtaatgatttttcgcgccctttggctaacactaaacgtacactcataatttacttttctgtcgatgcaaagaaatgggcgtcattgtccggagttttccatggatttgcaacgcgtccattaaggataaggagagcagcaatgtcgaaagtctgcataattgcctgggtttacgggcgagttcagggcgtaggatttcgctacaccacacagtacgaagcgaaaagactgggtttaaccgggtacgccaaaaatcttgacgatggcagcgtggaagtggttgcctgcggtgaagaagggcaggtggaaaaattaatgcagtggttaaagagtggcggcccgcgttctgcgcgtgtagaacgggtgctcagcgagccgcatcatccctcgggggaattaaccgattttcgtatccgttaaatacattttaccggttttggcaggccagcaattttggtggcttgcttagccggacctttcggaaacagtcggtataaatagcggctgttacctttttcttcgccaaatttattcgccatcgcttttaccagcatacgaatcgccggagaagtattgaattccagatagaaatcacgcacaaaacgcaccacttcccagtgttccggtgacagcgaaatcccttcgttctctgcaatcaccactgccagcggctcactccactggctgctttctttgagatagccttcggtatccgtttctatctctttaccttcgaagatcagcataattattactaccttaatcagactggcggcagtgtaacaaaaaacaaagccccgcataaagcgaggctatgaaagtgttagcgggtgagattaatcgcggctggcgaagcccagaatgctcagcaggctgacgaagatgttgtacagcgaaacatacaggctaaccgtggcacgaatatagttcgtttcaccgccatgaacgatgttgctggtttcaaacaaaatagcgccagaggagatcagaatgaagaccgcgctgatcgccagatgcagagcaggcagctgcaggaagatattagcaaccataccaatcagcaccaccacaatacccgccatcagcataccgccgaggaacgacatatctttgcgggtggtcagcacatatgcagagcagcagaagaacactaacgccgttccgcccagtgccatagcgattacgtcacccattccggcagacagataggtgttcagaataggtccgaggatataacccagaaaaccggtaaaggcgaatgcggagataatcccggtcggcttattcgccgttttataggtcaggaacatcaaaccatacatacccaccagcgtcagaatcagacccggagatggcagcatcagcaccgtactggcagttgcggtaatcgccgaaaaggccagcgtcaggctcagcagaaaataggtattacgcagcaccttatgggtgctaagcagtgatgtacggtcatgtgaagaactaacaatacgatccattgagtcactctctatgacagatgtaattaattaagcagcataatgataatgcgtaagggcacccagaagttttacccatctttacgcatttgatctggaacaggtttaacagcggattatcaggtcattaagcaaatataacgccctgagaatttcgacaggcaaaagaaaaaggggttagcatttagctaaccccttatcttatttggcggaagcgcagagattcgaactctggaaccctttcgggtcgccggttttcaagaccggtgccttcaaccgctcggccacacttccggaatgacgcgcactataaacatcccgatgcggcgtgtaaacccctaatttgtttgtttgcctgaaaaacagccaaaagtgcattgatagcgtgaaataacagcagattgatcatttcatcaccatgaattccttctcttttactcgtttagcaaccggctaaacatccccaccgcccggcaaaaagaaaaataggtccatttttatcgctaaaagataaatccacacagtttgtattgttttgtgcaaaagttggtgatgctgccaacttactgatttagtgtatgatggtgtttttgaggtgctccagtggcttctgtttctatcagctgtccctcctgttcagctactgacggggtggtgcgtaacggcaaaagcactgccggacatcagcgctatctctgctctcactgccgtaaaacatggcaactgcagttcacttacaccgcttctcaacccggtacgcaccagaaaatcattgatatggccatgaatggcgttggatgccgggcaactgcacgcattatgggcgttggcctcaacacgattttacgtcacttaaaaaactcaggccgcagtcggtaacctcgcgcatacagccgggcagtgacgtcatcgtctgcgcggaaatggacgaacagtggggctatgtcggggctaaatcgcgccagcgctggctgttttacgcgtatgacagtctccggaagacggttgttgcgcacgtattcggtgaacgcactatggcgacgctggggcgtcttatgagcctgctgtcaccctttgacgtggtgatatggatgacggatggctggccgctgtatgaatcccgcctgaagggaaagctgcacgtaatcagcaagcgatatacgcagcgaattgagcggcataacctgaatctgaggcagcacctggcacggctgggacggaagtcgctgtcgttctcaaaatcggtggagctgcatgacaaagtcatcgggcattatctgaacataaaacactatcaataagttggagtcattacccaaaagtttcactacgctttattaacaatactttctggcgacgtgcgccagtgcagaaggatgagctttcgttttcagcatctcacgtgaagcgatggtttgccttgctacagggacgtcgcttgccgaccataagcgcccggtgtcctgccggtgtcgcaaggagaagagacgtgcgatatgaataacgaggaaacattttaccaggccatgcggcgtcagggcgttacccggcgcagctttctcaaatattgtagtctggctgccacgtcgctgggattaggcgcgggaatggcaccaaagattgcctgggcgctggagaacaaaccccgcattccggtggtatggatccacggtctggaatgcacctgctgtaccgaatcttttatccgctccgctcacccactggcgaaggacgtcatcctttccctgatttccctcgattatgacgatactttgatggctgccgccggaacccaggcggaagaagtcttcgaagacatcatcacgcaatacaatggcaaatatatcctcgcagtagaaggtaatccgccgctgggcgagcaggggatgttctgtatcagcagcggtcgaccgtttattgagaaactcaaacgtgccgctgccggagccagcgcgattatcgcctggggaacctgcgcgtcctggggctgcgtgcaggccgcgtggcccaatccgacgcaggcaacgcctatcgacaaagtcatcaccgacaaacccattatcaaagtacctggctgcccgccgatcccggatgtgatgagcgccatcattacttacatggtgacctttgatcgcttgccagatgtcgacagaatgggccgtccgctgatgttctatggtcagcgaatccacgataaatgctatcgccgcgcccacttcgacgccggagagttcgtccagagttgggatgatgacgctgcccgcaaaggttactgcctgtacaaaatgggctgcaaagggcctaccacctataacgcctgttcctccacacgctggaatgatggcgtttctttcccaatccagtctggtcacggctgcctgggctgtgcggaaaatggtttctgggattgcggttcgttctacagccgcgtggtcgatattccgcaaatgggtactcattccaccgccgataccgtcggtttaaccgcgcttggtgtggtggcagcggctgttggtgtgcacgcagtcgccagcgccgttgaccagcgcagacgtcataaccagcaacctacagaaaccgaacatcagccaggcaatgaggataaacaggcatgagcactcagtacgaaactcagggatacaccatcaataatgccggacgccgcctggtggtcgacccgattacgcgcatcgaaggccacatgcgctgcgaagtgaatattaacgatcagaatgtgatcaccaatgccgtctcctgcggcaccatgtttcgcgggctggagatcatcctacaagggcgcgacccgcgcgatgcgtgggcgttcgttgaacgtatctgcggcgtctgtactggcgtacacgccctggcttcggtttacgccatcgaagatgctatcggtattaaagtgccggacaacgccaatatcatccgcaacattatgctggcaacgctctggtgccacgatcatctggtgcacttctatcagcttgccgggatggactggatcgatgtgttagatgcgctgaaagccgacccgcggaaaacctccgaactggcgcaaagtctctcctcttggccgaaatcatcccctggctatttcttcgacgtacaaaaccgcctgaaaaaatttgttgaaggcgggcagttggggatcttccgcaatggctactgggggcacccgcagtacaaactgccgccagaagctaacctgatgggctttgcccactatctcgaagctctcgatttccagcgtgaaattgtcaaaatccacgcggtctttggcggtaaaaacccgcatccaaactggattgtcggcgggatgccttgcgccattaacattgacgaaagcggcgcggtcggggcggtcaatatggaacgcctgaacctggtgcagtcgattatcacccgcacggcggacttcattaacaacgtgatgatccccgacgccttagccatcggtcagttcaacaaaccgtggagcgaaatcggcacgggtctttctgataaatgtgtcctcagctacggtgcgttcccggatattgccaacgactttggtgagaaaagtctgctgatgcctggcggcgcggtgattaacggcgacttcaacaatgtgctgccagtggatttggttgatccgcagcaggtgcaggagtttgtcgaccacgcctggtatcgttatcccaacgatcaggtcgggcgtcatccattcgatggcattaccgacccgtggtacaaccccggcgatgtcaaaggcagcgataccaacattcagcagctgaatgaacaggaacgctactcgtggatcaaagcgccgcgctggcgcggtaacgcgatggaagtggggccgctggcacgcacgttaatcgcttatcacaaaggcgatgctgcgaccgttgagtcggtcgatcgcatgatgtcggcgctgaacctgccgctttccggtatccagtcaacgttgggccgcattttgtgccgcgcgcacgaagcacagtgggccgcaggtaagttgcaatatttcttcaacaagctgatgactaacctgaaaaacggcaatcttgccaccgcctccacggaaaaatgggaacctgcaacctggccgacagagtgccgtggcgtcggctttaccgaagcgccgcgcggggcgttaggccactgggccgccattcgcgatggcaagattgatctctaccagtgcgtggtgccgaccacctggaacgccagcccgcgcgatcccaaagggcagattggcgcttatgaagcggcgctgatgaacaccaaaatggcgatccccgagcaaccgctggagatcctgcgtactctgcacagctttgacccgtgcctcgcctgttcaacacacgtgctgggcgacgacggtagcgagctgatctccgtgcaggtgcgttaacagcgaaggagaatcatcatgcaacagaaaagcgacaacgttgtcagccactatgtctttgaagcgccagtccgcatctggcactggctgacggtgttatgcatggcggtgttgatggtcaccggatactttatcggcaagccgctaccttccgtcagcggcgaggcgacgtatctgttctatatgggctacatcaggttaattcacttcagcgccgggatggtttttaccgtggtcttgctgatgcggatctactgggcttttgttggcaatcgatactcccgcgagctgtttatcgtgccggtatggcgtaaaagctggtggcagggcgtgtggtatgaaatccgctggtatctgttctggcaaaacgtccgagtgccgatataggccataaccccatcgcccaggcggcgatgttcggctatttcctgatgtcggtctttatgatcatcaccggctttgcgctgtacagcgaacacagccagtacgctatttttgcgccgttccgttatgtggtggaatttttctactggacgggaggcaactcaatggacattcacagctggcatcggctggggatgtggctgattggcgcgtttgtgatcggtcatgtctatatggcgctgcgtgaagacatcatgtccgacgacacggtgatctccaccatggtcaacggctaccgtagccacaaatttggcaaaataagtaacaaggagcgttcatgagcgagcaacgcgttgtggtaatggggctgggcaacctgctgtgggccgatgaaggtttcggcgtgcgggtggcggaacggttgtatgcccattaccactggcccgagtatgtggagattgtcgatggcggtactcagggactgaacttgctggggtatgtcgaaagcgccagccatctgttgattctcgatgccattgactacgggctggaacctggaacgctgcgaacctatgccggagaacgtattccggcttatctcagcgcgaagaaaatgagcctgcaccagaacagtttctccgaagtgctggcgctggcagatatccgcggacatctgccagcacatattgccctcgtcggtctgcaacccgcaatgctcgacgactacggcggccgcctgagcgaactggcacgggagcaactgcccgcagcggaacaggcggcgctggcgcagctggctgcatggggaattgtgccgcaaccggctaatgaatcgcgctgtctcaattatgactgtctgtcgatggaaaattacgaaggcgttcgcttgcgccagtacaggatgacactggaggagcagggatgagcaacgacacgccatttgatgcgttgtggcaacgaatgctggcgcgcggctggacgccggttagtgaattccgtcttgacgactggcttacgcaagcgccagacggcgtggtgttattaagcagtgacccgaaacgcacgccagaggtcagcgataatccggtaatgattggcgaattactgcgcgagtttcccggctacacatggcaggtggcgattgctgaccttgaacagagcgaagccatcggagatcgctttggcgtctttcgctttcccgccacattagtgtttaccggcggaaactatcgcggtgtgctgaatggtattcacccgtgagcggaactgataaacctgatgcgtgggcttgtcgaaccacaacaggagcgtgcctcatgagcgaaacttttttccatctgctggggccaggaacgcaaccgaacgatgacagtttcagcatgaatccactgccgatcagctgtcaggtgaatgatgaaccgagtatggcggccctggagcaatgtgctcacagcccgcaggtgattgcgctgttaaacgagttacaacatcaactaagtcaacgccagccgccgttgggcgaggtgctggcagtcgatctgttaaatctcaacgccgacgatcgtcactttatcaatacgcttctcggggaaggggaagtgtcagtgcgcattcagcaggctgacgacagcgaaagtgaaatacaggaggcgatcttctgcggattatggcgggtgcgcaaacgtcgcggcgaaaagttgctggaggacaaactggaggccggctgcgcgccgctggcgttgtggcaggcggccacgcaaaatctcttgccgacagattcgctgttaccgccgcccattgatggcctgatgaatggcctaccgttggcgcatgagttactggcgcatgtacgtaaccccgacgcgcagccgcacagcattaatctgacgcaattacccatcagcgaggctgatcggctttttctctcacgtctctgtgggccgggaaatattcagattcgtaccattggctatggcgagagctatatcaacgccacggggttacgccatgtctggcatttacgctgtacggacaccttaaaaggtcctttactggaaagttatgaaatctgcccaataccggaagtggtgctggcagcgccagaagatttggtcgactctgcgcagcggcttagcgaggtatgtcagtggctggcggaagctgcaccgacgtaaaaagacggtaagtatcgctttcagtcttatgaatatcgcaatcggcgaatacctctggtcgtagagtttcaggataaagagggagatctaacattatcgggttatttttctctcttcgcctacaggagtgcgcatgtgggatgtcattgatttatcgcgctggcagtttgctctgaccgcgctgtatcactttttatttgtaccccttaccctggggctgatttttttgctggctatcatggaaaccatttacgtggtcaccggcaaaacaatctaccgcgatatgacgcgcttctggggtaagctcttcggtatcaactttgctcttggcgtggctaccggcctgaccatggagtttcagtttggtactaactggtcattctattccaactatgtgggcgatatttttggcgcaccgctggcgatggaagcattaatggccttcttcctcgaatccacctttgtcgggcttttcttcttcggctggcagcggctgaataaataccagcacctgctggtgacgtggctggtggcgttcggttcaaatctctctgcattgtggatattgaatgccaacggttggatgcaatacccgaccggtgcgcattttgatatcgacaccctacgtatggagatgaccagcttcagcgagctggtctttaacccggtcagccaggtgaaatttgtgcacaccgtaatggcgggctacgtgaccggggccatgtttattatggcgatcagcgcctggtatttactgcgcggacgggagcgcgatgttgcattacgctcgtttgccatcggttccgtcttcggtactctggcgattatcggcacgctacaactcggagacagttctgcgtatgaagtcgcgcaagtacaaccggtaaaactggcggcgatggaaggggagtggcaaacggaacctgctcctgcaccgttccatgtggttgcctggccggaacaggatcaagagcgtaacgcctttgccatcaaaattcccgcgctgttagggatcctcgccactcactcattagataaaaccgtgccgggtctgaaaaatttgatggctgaaacctacccacgcttgcaacgcggacgtatggcctggctgttaatgcaggaaatatcgcaaggcaatcgtgagccgcatgtgttgcaggcattccgggaactggaaggtgacctgggctacggcatgttgctctcccgctatgcgccggatatgaatcatgtcacagccgcacagtaccaggcggcgatgcgtggcgcgatacctcaggttgcgccggtattctggagtttccgcatcatggtgggctgtggttccctgccgctactggtgatgctgattgcgcttgtccagacgctgcgtggcaaaatcgaccagcatcgctgggtgctgaaaatggcgctctggagtttgccgttgccgtggattgcgattgaagccgggtggtttatgaccgagtttggtcgtcagccgtgggcgatacaggacatcttaccgacatactccgcgcactccgctttaaccacaggacaactggctttctcactgatcatgatcgtagggctttacaccctgttcttaatcgccgaagtctacctgatgcagaaatatgcccgtctggggccgagcgcgatgcagagtgaacaaccgacgcagcaacaggggtaaaggggaaaatcatgtttgattatgaaacattgcgcttcatctggtggctgctgattggcgtgatcctggtggtctttatgatctccgacggatttgacatggggatcggctgtctgctgccgctggtggcgcgtaatgatgatgaacgccggatagtgataaacagcgttggtgcacactgggaaggcaaccaggtctggttgatcctcgctggtggggcattatttgccgcctggcccagagtgtatgcagcggcgttttccggcttttatgtggcgatgatcctggtgctgtgctcactgttcttccgcccgctggcctttgattatcgcggaaaaatcgccgatgcacgctggcgtaaaatgtgggacgccggtctggtcatcggcagtctggtgccgccggtagtcttcggtatcgccttcggcaacttgttgctcggcgtgccgtttgccttcacaccgcaattacgcgtggagtatctcggtagcttctggcaactgctgacgccattccctttattgtgcggattgctcagccttgggatggtgattttgcaaggtggcgtctggttacaactgaaaactgttggtgtgattcatctgcgttcacagctggccaccaaacgcgctgcactgttggtgatgctgtgctttttgctggcgggttactggctgtgggtcggtattgatggctttgtactgctcgcccaggatgctaacggtccttccaatccgttaatgaaactggtggcagtgctacctggtgcctggatgaataatttcgtcgaatcgcccgttttgtggatcttcccgctgctggggttcttctgcccattgctgacggtgatggcgatttatcgtggtcgcccgggttggggatttttaatggcgtcattgatgcaatttggcgtgattttcacggcaggcatcacgctgttcccctttgtcatgccgtcaagcgtgagtccaatctccagcctgacgttgtgggacagcacttccagtcagctgacgctgagcattatgttggtaatcgtgctgatatttttgcccattgtgttgctctacactctctggagctactacaaaatgtggggacgcatgacaacagaaactctccgccgtaacgaaaacgagttgtactaaggagcaggaacaatgtggtatttactttggttcgtcggcattttgttgatgtgttcgctctccacccttgtgttggtatggctggacccgcgtctgaaaagttaacgaacgtaggcctgatgcggcgcattagcatcgcatcaggcaatcaataatgtcagatatgaaaagcggaaacatatcgatgaaagcgatcttaatcccatttttatctcttctgattccgttaaccccgcaatctgcattcgctcagagtgagccggagctgaagctggaaagtgtggtgattgtcagtcgtcatggtgtgcgtgctccaaccaaggccacgcaactgatgcaggatgtcaccccagacgcatggccaacctggccggtaaaactgggttggctgacaccgcgcggtggtgagctaatcgcctatctcggacattaccaacgccagcgtctggtagccgacggattgctggcgaaaaagggctgcccgcagtctggtcaggtcgcgattattgctgatgtcgacgagcgtacccgtaaaacaggcgaagccttcgccgccgggctggcacctgactgtgcaataaccgtacatacccaggctgatacgtccagtcccgatccgttatttaatcctctaaaaactggcgtttgccaactggataacgcgaacgtgactgacgcgatcctcagcagggcaggagggtcaattgctgactttaccgggcatcggcaaacggcgtttcgcgaactggaacgggtgcttaattttccgcaatcaaacttgtgccttaaacgtgagaaacaggacgaaagctgttcattaacgcaggcattaccatcggaactcaaggtgagcgccgacaatgtctcattaaccggtgcggtaagcctcgcatcaatgctgacggagatatttctcctgcaacaagcacagggaatgccggagccggggtggggaaggatcaccgattcacaccagtggaacaccttgctaagtttgcataacgcgcaattttatttgctacaacgcacgccagaggttgcccgcagccgcgccaccccgttattagatttgatcaagacagcgttgacgccccatccaccgcaaaaacaggcgtatggtgtgacattacccacttcagtgctgtttatcgccggacacgatactaatctggcaaatctcggcggcgcactggagctcaactggacgcttcccggtcagccggataacacgccgccaggtggtgaactggtgtttgaacgctggcgtcggctaagcgataacagccagtggattcaggtttcgctggtcttccagactttacagcagatgcgtgataaaacgccgctgtcattaaatacgccgcccggagaggtgaaactgaccctggcaggatgtgaagagcgaaatgcgcagggcatgtgttcgttggcaggttttacgcaaatcgtgaatgaagcacgcataccggcgtgcagtttgtaatgcataaaaaagagcattcagttacctgaatgctctgaggctgatgacaaacgaagaactgtctaatgcgtagaccggaaaaggcgttcacgccgcatccggccactttcagttttactctttctcggagtaactataaccgtaatagttatagccgtaactgtaagcggtgctggcgcgtttaatcacaccattgaggatagcgcctttaatattgacgcctgcctgttccagacgctgcattgacaaactcacctctttggcggtgttcaagccaaaacgcgcaaccagcaggctggtgccaacagaacgccccacgaccgcggcatcactcaccgccagcatcggcggcgtatcgacaatcaccagatcgtaatggtcgttcgcccattccagtaattgacgcatccgatcgcgcatcagcagttcagacgggttaggtggcacctgaccgcgagtaatcacatcaaagcctcctttgccaaaatgctggatcactttgttgagctcatctttacctgccagatattccgacaagccatgttcattactcacggtaaacaggttatgcgaataaccacggcgtaagtcggcatcaataaataacactttttgatcggactgggcgatcaccgctgccagagttgaactgacaaacgttttaccactgtctggcgtcgcaccggtgatcatcagaatgttattctccgtctccatcatagcgaaatgcagactggttcgtagcgcacgtacggcttccacagcagaatccgccgggttatccaccgccaggaaggggatatttttagtacgatggcgctgctgattagaaaataaatttttcttacgcagacgggtgcgtttatccagccactcggacattgggatagtggcataaacgctgatgccgtgctcttccagttgttccggggcttctacaccacgacgcaacatcgcacgcgccagcacggcacccacagaaataaacaggccaagaataaaaccaagcaccacattcaacgcttttttcggtttcactggctgcggctgagtgactgccgggtcgataatccgcacgttaccaatggcactggatttcgaaatactcaactcctgctggcggttaagtaattgcagatataccgcacggcccgcttctacgtcacgacttaaacgcaacacttcctgttgggtggaaggcattgccgatacccgcttattcaggcgtttgcgttcttgctccagcgtctggcgtttttccagcagcgcacgataagttgggtgatctttcttatacagctgggagatctctgcctcgcggaaggtcagctcattgagttgattatcaacgttcacaatctgctcaagaacggctttggcttccaggttaaggtcaaccgaatcgcgctgctggcgataaacgttgagtttttcttccgcctggtccagctcgctgcgcacttcaggtaactggcgctgtaagaattcaaggctttgtgaatcctgcgccgcctggcgagcgatattctgttgcaaatagttgttagcgatgctgttcagaatacgagtaatcaactggggatcatcaccagtcatggtaagttccagcatcccgctttctttactgcgttcgctaacggtaaaggtttcctgcaatgcgttaatcgcttccagttcggtacgctggctcaggacaaactgtgttcctggtttggccttaatgtccgcgatagtcagcgcaacgccatctttttccagacgctggccgaccataccattgacggtgaactcttcaccttccagtgtatagtggccgttttccccaaccgtgagtgtcagttgctgatcctgaccattcagttgtggaatatgcatccagctgatcgccagctcacctggtttttctttggttaatctcgcccagccgcgacccacaatcggaaaatacttctgctcaactatgtcgcgcagattcagttcagcaatggttttaccgagaatcatgcgcgattgcagcagttggatctccggtgcagactcgggcgatgagttagggatcatatcgctcaggccgctgagaatggcgttgccctgtttttgctcaacctggaccagagtatctgcctgataaattggtgtgcttaacagcgagtaagcgacagcgatcagcgtgaataacgcggtcacgctgataataaacttacggtgatcccataactcgccgaccagacgaagcagatcgatctcattttcctgagtgctgcctggtggcgtattcatatttttagttgtcatcgtattttataaactcaaattatcggctgaggcgcttcgcccattcctgactggcgcgctccaacataccgtagacatgttcaaatgcgtcctgacttttacgatagggatccgggatctctttctgttccagccattgcccaaacagcattgtcttcccgcggacctcgggagcaattgcggtaacctgagcaatatgttccgactccattgccagaatcagatcgtaatttcgtgccatctcagcagtgagcttacgtccggcatgtccttcaagagatacgccatgattagcggcaacatctgccgctgtcgcatctgcagggtgttttatcagaccatgaacacctgccgatttgacttttacgcccggcagacgtttacgcagcaagcgctcgccaatgggcgaacggcaaatgttgccggtacaaaccaccaggattgagttaaattttagttgggccatgtttgaatccaccgtgaagtctctgtcaggtcatgcaccccggaaatcgtcggtaccagcagagaaatcacacggttccaacgagccagcggcgcggtagtgacataaacaatgtcgtaaggttcaagctggaattccgttccgagtatcattgccgatgcgtccttcgcattcagctgataaatattggcgattttgccattctgcttgttttgcgttgcacgaataacaaaaatccccgtcgcatcagcgacatcctgattcataccctcagcgttacccagcgcttccgccagggtcataccgctgcggtccattttcagcgtgctctgtttacccacttcacccatcacgaagactttcagatcatcgttgcgcggaataaataaaatatcgcccgggtgcagcagtttgttctggcgcaagtcgccacgctgcatcagcgcatagaggttcactttggtctttacgccattctgggtgagcaccacgttgcgccagtctgcatctgcggtcagaccgcccgcggcgttaatcgcatccatgatggtcagaggaatattggtaatcggctgctgacccgatttgctgacttcgccggtgacgtacgctttttgcgatcggaacgccgcgacgctgacatcgacttgcgggctttcaatgactgaatcgagacgcgctgtaatctcgttgcgtacctgggtaagtgttttcccggccactttcaggcgaccaatataggggtagaaaatcgcaccatcggcgttaacccagttgccggtatcactggcgctacggtattgccctgcgggggtggttagttccgggtgatcccagaccgtaaccatcaacacatcaccaatcccgatacgatattcatagtttgcgatttgctgctccagctccgggttagcctgcgacataatcggtttggcgcgcaactgatcaatcaatcctggcgtgacgggatagatattgaccattttgtccaggtcatactgattgtcaggtagttcaatgacatccttgttactggtcgataaattctgaccaggaacaagggtacatgctgtcaaagacagaacagccaatgtcagtaccgaaaacttaaaaatgttctttttcattggtttatatttatcagtcaatgtaatgttatgaattacgtcaggttattgtccaaccggtacttctcgctctgccgtcattggatagagctggtatttgcgtgacagcatttgtccaccatcacgcgtcaatggtgtccacgaaaccaccgcgcggttgcggttaggtccaatggtcatcaagtcgaacggaatcgagatataaaaacctttactaaagccgccttcgccgtagtcatctttagatacgttactgattgccgcccatacccctaccgccacgccgctgtcaaagcgtttggcgacgtcgatcgttgcccctttatcttttgccagatattgcccaacgctaagtttcatcagtacgccattgagcgtcggcgggttccagtaagccgtcacgaaaccagttggcgtggaataatcggtgaagcgcatcatgttgtcccagtcacgttgcttcacgtagttaacgtccacacccagcgcccagctggcatctagcgggcgataaagcagctcggaaccgacaccggcgtacatcgtttccagataaccgccatacacctggccatagaaaccattgcctaagtcggcaaagtagttcgcctgcaagttgttgagataaacgtcattgcgaacgtaatcacggatatgcgtgcgcacgcggggcagggtagagtccgcgggcaactgcgaagacttaaacttgtcgtagttgttgtaaatattggtgaaaataccgccatcaagcagcaggtggtcggtaaaccagtagcgggcactggacatcagccccagctggaacatatagaaatcttccgggccgcccagcgactgtgaaagtgttgggttgaaagagtagctaaagcgatcttcacgaatacggtagccccgaccaaaggcagaaagatcttctgcttcaacacgttgttgttgaagttgctctgattgaccaggcgctgtaccagccagctgtttgcgcaggctggctacgtcggtttcggtagtcaccatcgccatatgctcgcgcttttgcgtcacgctaatcttctcaacgccttgcggcaggttattcaccagaatccggttggcacgatcgaccgcttcgcgagaatcacggtatttgtattgttgaccagacatatacagcgtcttatcgcgcagctgaatttccggtgcttcaaaacctgcgttgtacttcagcgcggtaagttggttcgctactgtggtgtactgcaatccttcagattcaggcgcaggttgatatgccggttttggcgtatcgcgcagggcagggcgcagatcgttgaaattggtccgtaacgtgaagccaaacatcaacgtgttaccgcgttcataactcaggttgagatctgcccagctggcagcgcgataaactgcgccgacgttgaaatggcttgcctgaggcagtttgccagcgaaatcattctggtaattgttgccatcgtattcgagtttcagacgcaggggattccacggcgtttgatactcaatgccgccaaagatggaagccgggccacgaaagatatcgctaaagctgatatcgcccgcatcgtgagactctgcgcgatgacaatatttatcgctcacccggcaaaacgggttggtaatattgcccgcattaccggcgtagccccatgccatcccgagggtgaaatcaaatggccccgcttgcttgctggccaccagatactcaccgtcaaacagacccgtaccagcaatatcacgtttaccaaacgccacttgcggtagccagtaaccttcttcccacaggcgaagtttaaaatcgaatgatttgtctttgtatgactgatcgccgctgaaatcttcccactggctatatttgcgtgtgcgcacatccgtataacgaatggtgccttccagccatgggaacagcgccacggaggtggagtagaaccggtattgatcgttatcccggtagttgacgctgaattcaccttccggtgcgatgcgcgcatttggcatctgcaacaatcctgtgccgccaaagtctgattgcgacgaacccagcggatccgggtaggttaatacttcagcatgacaggcactggagacggcaatggccaggcagcttaaaagataagaattcttcttcatcagtcaggaacacgttgcgttaaaacagacacaatctggtcatttaaatcagcatatttttcgggcagtacatgcgcagaaaagcccaaccaaagctggctgccaggcggtggttccacatgtcttttattccacagggcaacaggggcgacgacagtctcaccctcaggcgtaatcaccataacgttattcttgtccgcgcctgcaaggcgggggtgatcttgcagataatcggtaacgctacggcctgcctgccagggcaattgcccggccccagaaaccgcacccagcagagtaatagtcaccggacgctgtacggtatagagcgtatagtccccgaccaacgggggattgctgttctcatccactcgtacaaaatcagggtccagtttgaccggtaagcgaccagtgatattgagattgagtaactgctggcgcacggatttaatcgttgccgccacatcgtcgtcagcttctgcttcccaggaagcaagctgtgccatgacatgttggtagtctttaagcgctttagctttcgccgcagagtcggtcagcaaggcaccaggccaccagaggcgatcgcgcagttgcggttgtgtcaccaactggacaacattttccatggggccaacggaaagtgtctgttgttcgccaggcagataaatagtcaccgttccttgcgcaaaggcatggggtgtcattacgtaaagtacgctggcaatgaaatacgactgtaatttattcatggtgcgggtttaagaaacgtcatttctacgggaataacccctgcgcctaacatttgccgactttgacgaacctggccagtagccgaatcgacccagaatgtgttttgccactgtttttctggccgcgtggaagtcacctcttcctgccagacattacacagcacattgcgacccgcaatattcagcgtctctaatccagcaaaggaaaaagtagaactcagggtcgcagagcgaaaatggttgtcttcactccagagaatatcgcgcgtccagcggctgccatcttttattgccagcgcgttacgcagagggtcctgcccggaatttgtcacttccagcagattattattaagtttgacggtttttaaaagacgtccattgtgggtaaccagcatggcgttatcctgggataaccatttgctttgttcttgttctatatatcccagtaccacaaagattcgttgcccttcattaaggcgtaaatacatcgtggaataaggcaacgcctggatctgctgatccgctacggtgatatcctgattatcgaaaaggctggcgcgaaatgtatcgaccatactttgctggctgtgcgtacatcccgcaagaaatagtgcgaaaatcgataaaataagagggcgcacctttaatccttgaaaggttaattaaaaaaatgcaaatctctaaagcccggtacgaatatcgcaaccgggtatcatttaactttaatttcgacgcgttaaagcagtattagcgtgtagtggacgtggtggttgaggtgttatgagaaccgccatcgccactgtcatttgctgcaacaactgccaacgtcgccacaccaacagccgttgccacaccgacaactgtcgccgtgccgacagcgccagcagccacgccaccagtggtagtagcagtcgtggttgcgccggtagtggtcgttgtggtgccagtagtacccgtcgttgcctcggtcccgtttgttgcttcagaggcagcaaacgcagctggcgtcgtcaacatgaaggccataaggattgcagaaagcttgtgtttcataacttttcctttattcatcgcatggacaatacgtacgcttgagatcaggattgtctactttgagtataacatccttgtgaaatctccctttcctcataccgcttgcactatatactgatactgcgggtaggaaaggtgcgcagagggaaatataagattattaacgatcccctctggaaatacgacttgtgagcataagataaatcttagcaaaatacaaattaaagataaggaaattgttacgaaagctattaattattgttggtaatatagtttcaagtggtactataactggctgttaaatggcatttataactattaggtgcagagatattcgcttaaatggattagtttctttgtggaaaagtaactgatgttataatgtatgatgttgactattgcactattccaataaaaccagtcagctttaaacaagcagcgtcatattaagagagataaacatttgccgctgttggtcctcgcaggccatttacgcggcaaaattccacacgtaatcctggtataagcacttctgcgtcgcggggagtgaatgcggaaatatggacctgaacttctttacgaccgtcggaggggataatgaatcctttgccgcttttgcgatcaaaggttttgacaattcctgtcattttacgggacaaacaaattccttactgaaaatactgcgctgcactatacggggttaataaaataaagccagcgatatttaagaccgccggacgggtaatgactccaacttattgatagtgttttatgttcagataatgcccgatgactttgtcatgcagctccaccgattttgagaacgacagcgacttccgtcccagccgtgccaggtgctgcctcagattcaggttatgccgctcaattcgctgcgtatatcgcttgctgattacgtgcagctttcccttcaggcgggattcatacagcggccagccatccgtcatccatatcaccacgtcaaagggtgacagcaggctcataagacgccccagcgtcgccatagtgcgttcaccgaatacgtgcgcaacaaccgtcttccggagactgtcatacgcgtaaaacagccagcgctggcgcgatttagccccgacatagccccactgttcgtccatttccgcgcagacgatgacgtcactgcccggctgtatgcgcgaggttaccgactgcggcctgagttttttaagtgacgtaaaatcgtgttgaggccaacgcccataatgcgtgcagttgcccggcatccaacgccattcatggccatatcaatgattttctggtgcgtaccgggttgagaagcggtgtaagtgaactgcatttgccatgttttacggcagtgagagcagagatagcgctgatgtccggcagtgcttttgccgttacgcaccaccccgtcagtagctgaacaggagggacagctgatagaaacagaagccactggagcacctcaaaaacaccatcatacactaaatcagtaagttggcagcatcacccgccggacggctaaaataaaatttgcttaatctcaattatcatgcgttaatagctgcgtcggtttgaaagacagacagcatacaaagtagtttactaaagcagttctcattatcaggcattatccccttcttttgagtctctctcctgaacactaagtagtttctgtattaaagccctgtttgccgaaaggcccaaaatgaaggaagtaaaatatgtctaataaaatgactggtttagtaaaatggtttaacgcagataaaggttttggctttatcactcctgatgatggcagcaaagacgttttcgtccatttcaccgccatccagagcaatgaattccgcacgctgaacgaaaatcagaaagttgaattttctattgagcaggggcaacgtggccccgcggcagcgaacgttgttacgctctaaggttgccgttattactcaacatctccatttccgctgtccatgttgtcatggttcacagtaccgcacatcggcattcgatgtgacggagcgaaaccctttgggcgctaagtgtattttttgtaaatcgacgatgatcacctttgataacgtcgcgctgcaaatacgcactgaccatgcgccgctggatttcacaaaataatatcaggctccctcgtggagtaatgccgatcagttaaggatcagttgaccgatccagtggctgtgtaagaatccggaaacgctcacttgtttccggatttttttatgcacattggacaggctcttgatctggtatcccgttacgattctctgcgtaacccactgacttctctgggggattacctcgaccccgaactcatctctcgttgccttgccgaatcaggtactgtaacgctacgcaagcgccgtcttcccctcgaaatgatggtctggtgtattgttggcatggcgcttgagcgtaaagaacctcttcaccagattgtgaatcgcctggacatcatgctgccgggcaatcgccccttcgttgcccccagtgccgttattcaggcccgccagcgcctgggaagtgaggctgtccgccgcgtgttcacgaaaacagcgcagctctggcataacgccacgccgcatccgcactggtgcggcctgaccctgctggccatcgatggtgtgttctggcgcacaccggatacaccagagaacgatgcagccttcccccgccagacacatgccgggaacccggcgctctacccgcaggtcaaaatggtctgccagatggaactgaccagccatctgctgacggctgcagccttcggcacgatgaagaacagcgaaaatgagcttgctgagcaacttatagaacaaaccggcgataacactctgacgttaatggataaaggttattactcactgggactgttaaatgcctggagcctggcgggagaacaccgccactggatgatacctctcagaaagggagcgcaatatgaagagctcagaaaactgggtaaaggcgatcatctggtgaagctgaaaaccagcccgcaggcacgaaaaaagtggccgggactgggaaatgaagtgacagcccgcctgctgaccgtgacgcgcaaaggaaaagtctgccatctgctgacgtcgatgacggacgccatgcgcttccccggaggagaaatggcggatctgtacagtcatcgctgggaaatcgaactgggatacagggagataaaacagacgatgcaactgagcaggctgacgctgagaagtaaaaagccggagcttgtggagcaagagctgtggggtgtcttactggcttataatctggtgagatatcagatgattaaaatggcggaacatctgaaaggttactggccgaatcaactgagtttctcagaatcatgcggaatggtgatgagaatgctgatgacattgcagggcgcttcaccgggacgtataccggagctgatgcgcgatcttgcaagtatgggacaacttgtgaaattaccgacgagaagggaaagggccttcccgagagtggtaaaggagaggccctggaaataccccacagccccgaaaaagagccagtcagttgcttaactgactggcattactccctcgtggagccttttttatatctgccttatttttcttcaacgctgtatgtatagtaagcgataacctgttgattattgaatctttcggggagatggcttataacatttcttacctgaccagggtaccgggaaccaacaccttactggcgtgttgctgtcttttaagaccagaagaggttaacagtgaatattgaagagttaaaaaaacaagccgaaacggaaatcgccgactttatcgcgcaaaaaatcgccgagctgaacaagaatacagggaaagaagtctctgaaattcgcttcaccgcacgagaaaaaatgaccgggcttgaaagttatgatgtcaaaatcaaaataatgtgattttgtgaacatcaccccgtgcgaggtgatgttccgcttgttgctaatttagtgaccaatcattggcgcttgtggaattaagcgtcggtacaattcctccggcaccgggctttgccatactcccgcatacattgcgtaaccaatcaccgcgaacataatcctcagaaccagtagcgtcattaaccagccagacaacgcaaaagcttttttatttgccgcaggtttttgcagtgaaaaggtcaatgttgaggctaccggacatgactctacgcaagtcatacagccggtacattccactgttcgtacctgaattaatttatctaccgggatccgtgatgggcaattttttgcgcatttgccacagccgatacaactttcggcattgcgacgaatcttaaacggcgataatagcgaaaccacgcccatcagcgcgccatatgggcaaagataacgacactaggcatggcgaataaacaggctggcaatcagcaaaacggtcacgctgattaatgtcgcggtccccatatgacgaaagaaatcgagcatttttacgtccatcaccacgctgtagggcgacaacataaaatagtgaatcgcctgagcgggcatcaataacgcgatatagagaaaaaaactcaacagcaaatacttcacgccgcgcagaggaatatccagccagcggggaaggacacattgccgaccaaacagtttgttaccgagatcgccgattaattcagaaagcgtaccaaccgggcataaccatgagcaaaaggcctttttgagtaatagactgatgacgataaaagcgaccaataacagcatcgcggcggcgtggacggacggtaactgacctgttgtaaggctatatttcagattcatcagaccggcaatcggtagccagccttcgatacctcccggtctggcgacaaatgtcgtgctacttgccgtttcgtaatagcgcacccaataccagaacgtgatggcaatataaatattcattgccaacagtaataattgcgtcgctttacgccaggtcgtggcattgcgccagtcattccacggtaatttgccgcccgtcgtgcctggccgccgctgccagcgggttctttttttctctgccatgattttgccagtccgttaagttgcataccaaatgccactattctagttgttcttaactggctgatattgattcaaatcgcgttcaggtctttcttatgcaaccatgcttccagagcggcaacactgcgtgtaatttcttcgtgtggaaggggggcagataatggctgctgctccagttgtgcgcatagctggctggcgatacgcattcccaaactcgagcaactgctttttagctgatgcgcggcacgctttattttctcgctatcctgactggcgcgggcaatgtcgatttcatcgagaagcggcagggcatgttgtgtaaataataccagccattcgtggatcttctccgtccccattaactgagcatcttcattgagttgcgatacatccagcgattgatcgttattgacttgcagttggagatagtgcgccagtaactgaccgagcacttcacgcggcaccggtttagggataatcccgcggaataatgaactggtacgctggcgcagcgtttcgtcaatgacatgggcgctaaagccaatcaaaaccagcgacggatattgctgtgccagttgtcgggcaagcgtaatgccgtcgacatccggcagatcaaaatccaccagtgcggcagcaaacggttcgctattttgcagtgtctctaaagcctgcgcggcattgccaacagcaacaacctgcgcaccactggtgttcagcatctcaacggtaattcgctgggttagcgggttatcttcaattaacagcaaacgtaaaccgtcaagacgcaccgcctgattgactgtttttggcacgggtgccgtggcaacacgtaacggcaagcgtaaacaaaaacagcttccaacctccggcgtgctggtggcgctcagttcgccgcccatcgcctgggccagacggctactgatagtcagccccagcccggtgccgccgcgtttgccgcttacctgcacaaatggctggaagatttctgccagtttcgcgggatcaataccgcagccgctgtcttccacttcgaccagccattgctcgccatcagtgcgactacgcaggataatgtacccttcgtcagtaaaacgcagggcgttgctcaacaggttggttataacctgacgaatacgtcgtggatcgcccattaacgcgcacggcatatcatcggcaattgccgttgccaggcgaatcgggcgacctttcacccgtccgctcattaattgcagggtactttccagcagcgggcgcggttcaaagggctcatcgctgaccgaaacattcttgccacctgcttcgatagcggaataatcgagaatatcgttgaggatggtcagcaacgattcaccagagtcagtaattgcccgcaaatcatcacgctgggcgttaagtgcggggttatctgccagtagctgtgcggtgccgagaataccgtacagcggtgtgcggatctcatggctcatcgccgccagaaacgccgattttgcctggctggctttttctgcttccgcccgtgcctgtcggtgttctatcactagttcctgcaattcagctgtacgcgctttgacctgcgccgccagctgttcacggtggcgattcagtgcatgaacactgctgcgaaacgcacccatcagctgcccgatggtgtccagctcccgtacgccagcggtttccgggaaaggggagtcaatatcaccgtccagcagccgttgcagcgcctgcgtttgttcggcaagtggacgcgtgactgagcgataaaccacgcgccagaggatcagaatcagtgcgcaaagtgaaaccatccccagcaataacaggctgtattgcccgcgtgcactggctttttcctgatgcgccagtccgtgctgattacgcagctcaatggtgtcgaccagctgactgacttcgctactaaactgcgcgaactgggcgatattattttgggcgagagtttgcaggtgattgctgatttcactgtcctgctggaacagcgccaacagatcgctatattggctaacggtagttaacgttgttgcgacctgcgcacgaactcccggatcttcaatgcgtatttgccgacgttgcagaattttcaccgcattattgagctgcttttccagcgttggtgcatttttctggatctgctccagccccagattcatcaccatttgctgcacccgcagagcgctaaggcgcagttcattcatctggttaacatactcaagatcgatatcaatcagccgatcgagtgcactttcagcagcctgacgctgatcttgttcgatcaaatcgtaaatcccggcctgggtcgctccagcggaagttgtcgcattattcgcctgaccttgcgccaggcgtgcgatctcatcggcggcagcgactatctgctgactgagttgctgttgttgctggcgtagttgcagacgccgccccaccagttccccttgctgacgtaacgaacgggagatctcctgctcctgttgttcaatagcggtggtatcaaaaccttgttcccgtaacgcttgcagcaacgcattaatcttcaggctttgtgcggtgagcattcgcccctgcgcctgccacatcttttcgttatcggcactggtcaggttctgcgtggcgaaaagttcccaggcgctggcttcgctcaactggcgcgccatattcatggtaggaatcaatgcctgagtattgtctttttccacctggctgataaagcgcaggttgtaccatcccaccagggtactggtcagggttaacagcgccatcagggcaaagcccatccagagtcttcgggtcagggttaaattcacggtcggtgcactttaggtgaaaaatgttgagtcgcaaagcggaatgcatctagcataaagccttattattgatgaggctatcatgcgcgtactgctatttttacttctttcccttttcatgttgccggcattttcggctgataacctgttgcgctggcatgatgcgcagcatttcacggtgcaagcctctatgccgcttaaagccaaacgcgcatggaaactgtgcgcgctttatcccagcctgaaagattcatactggttatcgttgaactatggtatgcaggaggcagctcgccgttatggtgtggatttaaaagtgctggaggcaggcggctacagccagttggctacccagcaagcacaaatcgaccagtgtaaacagtggggcgcagaggccattttactcggtagtagcacgacctcatttcccgatctgcaaaagcaggtagcaagtctgccggtgatcgaactggtaaatgctattgatgctccccaggtgaaaagccgcgttggtgtaccctggtttcagatgggctatcaacctgggcgatatttggtgcaatgggcgcacggtaaaccactgaacgtgctgttgatgcccggacccgataatgccgggggcagtaaagagatggtcgagggttttcgcgcagccattgccggaagcccggtgcgtattgttgatattgcgcttggtgataacgatattgaaatccagcgtaacctgttgcaggagatgctggaacgccacccagaaatcgacgtcgttgccggaacggccattgcggcagaggcggcaatgggtgaagggcgtaacctgaaaacgccgcttaccgtggtgtcgttttatctttcacatcaggtgtatcgcgggctgaagcggggaagagtgattatggctgccagcgatcaaatggtctggcagggggaactggcggttgagcaggccatcaggcaattacaggggcaatcggtgtctgataatgtcagcccaccgattttagttctgacgccgaaaaatgccgaccgtgaacatattcgccgctcgctgtcaccagggggatttcgtccggtctatttttatcagcacacatcagcggctaagaaataaccttcaccatgttgcgtcaccagtaaatccgcgctgagtttatgacgtaaacgacgaattaacacatcgacggtgcgcaggtcagggttttccacccgacgcgcagaaagcatacgtagcagacgttcacggctgagaatttcgcccggattcgtcacaaatgccaccaacatttcatactctgcgcgggtcagtttaatcggctcgccatcccgctccagcgtatggcgcgacacattcaggcaataaccggcaaagcgatagcagttgtcctgagtgtgcggttgagcttgtcgcgcgaggtcgattcgccagagcagatttttcacccgtactaccagttcgcgcagttccagcggtttggtgacgtaatcgtctgcgcccatttccagcccaacaatacggtcaatccgatcgctgcgtccggtaaccagaataatccccaccgttgagcgttctcgcagggcgcgggttaacatcaggccattttcatcgggtaagttgatatccagcagaattaaatctaccggctgattctgcataatttcccgcagcccggcaccgctcgctgtaacggaaacggtatacccctcctgagtgaagtaagattgtaatcgcgcctgggtaaccggctcatcttcaacaataacaatgtgatgtggcatcagagggttttactcattctgttcatattctgccgtaagccgttcatcctgaccagtgccgctgttcatatttgctcattaagatcgcttcactaaaccataattttacaggggctattatgcggaaactctggaacgcgctacgccgacccagtgctcgttggtcggtactggcgctggtcgctattgggattgtgattggcattgcgctgattgtattgccacacgttgggatcaaagtcaccagcacaaccgaattttgtgtcagttgccacagtatgcaaccggtgtatgaagaatataaacagtcggtgcattttcagaacgcctctggcgtgcgagctgaatgccatgactgtcatatcccgccggatattccaggcatggtgaagcgcaaactggaagcgagcaacgacatttaccagacctttattgcccactccattgatacacctgaaaaattcgaagccaaacgcgcggaacttgccgagcgtgaatgggcgcgaatgaaagaaaacaactcggcaacctgtcgctcctgccataactacgatgcgatggatcatgccaggcagcatcctgaagcggcacgtcagatgaaggtggcagcgaaagataatcaatcctgcatcgactgtcataaaggtattgcccaccagttaccggatatgagtagcggcttccgtaagcagttcgatgagctgcgcgccagtgctaatgacagtggtgacacgctgtactctattgatattaagccaatttatgcggcgaaaggcgataaagaagcctctggttctctgctgcctgcttcggaagtgaaagtccttaaacgtgacggcgactggctgcaaattgaaattaccggctggacggaaagcgccggacgtcagcgtgtactcacccaattcccaggtaaacgcatctttgttgcctcgattcgtggtgatgtgcagcagcaggtgaaaacgctggagaaaaccaccgttgccgacaccaataccgagtggagcaagttgcaggccaccgcgtggatgaagaaaggcgacatggtgaacgatatcaaaccgatctgggcctatgcggattcgttgtacaacggcacctgtaaccagtgccacggcgcaccggaaatcgcccactttgacgctaacggttggatcggcacgctcaacggcatgattggctttaccagcctcgataaacgtgaagaacgcaccttgttgaaatatctgcaaatgaatgagtctgacaccgcaggtaaggctcacggcgataagaaggacgaaaaataatgaacaataacgatctctttcaggcatcacgtcggcgttttctggcacaactcggcggcttaaccgtcgccgggatgctggggccgtcattgttaacgccgcgccgtgcgactgcggcgcaagcggcgactgaggctgtcatctcgaaagagggcattcttaccgggtcgcactggggggctatccgcgcgacggtgaaggatggtcgctttgtggcggcaaaaccgttcgaactggataaatatccgtcgaaaatgattgccggattgccggatcacgtacacaacgcggcgcgtattcgttatccgatggtacgcgtggactggctgcgtaagcgccatctcagcgatacctcccagcgcggtgataaccgttttgtgcgcgtgagctgggatgaagccctcgacatgttctatgaagaactggaacgcgtacagaaaactcacgggccgagtgccttgctgaccgccagtggttggcaatcgacggggatgttccataacgcttcggggatgctggcgaaagctattgccttgcatggtaatagcgttggtacgggcggagattactctaccggtgctgcgcaggtgatcctgccgcgcgtggttggctcaatggaagtgtatgaacagcaaacctcctggccgctggtattgcagaacagcaaaaccattgtgctgtggggctctgatttgctgaaaaaccagcaagcgaactggtggtgcccggatcacgatgtttatgaatattacgcgcagctaaaagcgaaagtcgccgccggtgaaattgaggtcatcagcatcgatccggttgtcacatccacccatgagtatctggggcgcgagcatgtgaagcacattgcggttaacccgcaaactgatgtgccgctgcaactggcgctggcgtatacgctgtacagtgaaaacctgtacgacaaaaacttcctcgctaactactgtgtgggttttgagcagttcctgccgtacctgctgggtgagaaagacggtcagccgaaagatgccgcataggctgaaaaactgaccggcattgatgccgaaaccattcgtgggctggcgcggcagatggcggcgaacagaacgcaaattattgctggctggtgcgtgcagcgtatgcagcacggtgaacagtgggcgtggatgattgtggttctggcggcgatgctggggcaaattggcctgccaggtggtggctttggttttggctggcactataacggcgcaggcacgccggggcgtaaaggcgttattctgagtggtttctccggctctacgtcgattccgcctgttcacgacaacagtgattacaaaggctacagcagcaccattccgattgcccgttttatcgatgcgatcctcgaaccggggaaagtgatcaactggaacggtaaatcggtaaaactgccgccgctgaaaatgtgtatttttgctggaactaacccattccatcgccatcagcagatcaaccgcattattgaaggctggcgcaagctggaaacggttatcgccatagataaccagtggacctcaacctgccgctttgccgatatcgtgctgcctgcgaccacgcagtttgagcgtaacgatctcgaccagtacggcaaccactccaaccgtggcattatcgccatgaaacaggtggtgccgccgcagttcgaggcgcgcaacgactttgatattttccgcgagctgtgccgtcgctttaatcgcgaagaagcctttaccgaagggctggacgaaatgggctggctgaaacgcatctggcaggaaggtgtacaacaaggcaaaggacgcggcgttcatctgccagcgtttgatgacttctggaataacaaagagtacgtcgagtttgaccatccgcagatgtttgttcgccaccaggcattccgcgaagatccggatctcgaaccgctgggcacgccgagtggcctgattgagatctactcgaaaaccatcgccgatatgaactacgacgattgtcaggggcatccgatgtggtttgagaaaatcgaacgctcccacggtgggcccggctcgcagaagtatccgttgcatctgcaatctgtgcatccggatttccgacttcactcgcagttatgtgagtcggaaactctgcgtcagcaatatacggtagcgggtaaagagccagtattcattaacccgcaggatgccagcgcgcgcggtattcgtaacggtgatgtggtacgcgtctttaacgctcgcggtcaggtgttggcaggggcagtggtttctgaccgctatgcacccggcgtggcacgaattcacgaaggggcatggtacgatccagataaaggcggcgagcctggtgcgctgtgcaaatacggtaaccccaacgtgttgaccatcgacatcggtacatcgcagctggcgcagttgttctcccgtgaactggacgatgaacaactgacgcaaatctccagtgcgcagatggctgaatggttttcgttgctgaaaagcgaaccgccgctcactgcggcggtgaatgcgctggaaaaccgtattgccgctctgacagtacgtgacgatgcccgtctggaactggccgctgacttttgcggcctgtttctgatgaccgacaaacaagcggcgctgccgtatgcatcggcctacaaacaggacgagcaagagattaaacgcttgttagttgaggcagggatggaaaccagtggcaatttcaacgaatcggcagatcatctggcgatctatctcgagttgttgagtcatctgcatttttcgctgggagaggggaccgttcctgcgcgaagaatcgacagtttgcggcaaaaaacactgacggcgctgcggcaatggttaccagagtttgctgcgcgttgtcgacagtatgacagctttggtttttacgcggcactaagccagttattgctggtgttagtggagtgcgaccaccaaaacagataacgtcgtttatgcgcctgaaaagacgcgtttagcgtcgcatcaggcattatggcgcagttgccggatgcgtcatcacatccggcaaacacacatcacggatgagctacaaaccgggaaagccgctggcgtagcaggcggttttcctgcttcaggtgcgcaatatcatccattaacgtcagcgccaccgcgatccccggccagtccagagccagttcatgacgcaggcgtaccgcgcgttgcaccacaatggcggcatggtcgtcaaatacccaggttgtttcctggatctcacgcggttcaaccacccccaaaccgacaatttcattcaactcctcttcagagatgccggtatgcaggcaaaattcggtaatagtaaaagtcaccgtaacattagccatcatgctttcccccaatctttacgtggatcaaaagacgactgggcgtctgccagttgctgccacagcgcggcagtgttttcatccggtttcggcggcatcacgattttcagtaccgcatacagatcgccggtctgttttttgctcaccagacctttgcctttaacgcgcaatcgttgcccggcctggctgcctggcgggatagtcagcaaaatgctttctttcagtgttggaacggtgactttagcacccagcgccgcttcccacgggctaaccggcaccacaatttccagatcctggccgacaatatcgaacagcggatgtggcgcaatatgaatcaccagccacaaatcgccatttggaccaccgttttcgcccggcgtcccctggcctttcagacggatgcgttgaccattgccgacgcccgccgggatcttcacattcagcgttttcgggatttcctgttcgatcatgccaaaggcgttataaaccggcaggttatagctgatggtacgcttatgctcagtcagcgtttcttcgaggaataccgccacttcgatttcaatatcgtggccgcgtgcggcggggcgttgacggctctggcgggcatgctgaccgaaaattgacgagaagatatcgtcaaaatcttcggcattaaaactctgaccgtcgccatgatggaactgatggttaaattgcggatcgttgcgatgttgccacatctgatcatactcagcgcgacgttgttcatcacttaacacttcccaggcttcagcgacctctttgaagcgggcttcggcatccggttctttgctgacatcaggatggtatttacgggccagtcgacgataggcggtcttgattgtcttgagatcgtccgtcggtttcacgcccatgatggcgtaataatcctttaattccatagcgttatctcgcgtaaatcaacacaaattgaaggaacccctgtaaggtaactcctataagtgtagggtaatcctcaaaatttcatatgccaacacagaatatgttattgaaatcatcgcggagaggaggtcgccatcaagatgggttgctgaacatattttaaacaggtgaaaaagggtgagcgatttttgatagttgaaccaggcactttaagtttaactagggcgtcattatttattaaattttatagacgctatatatgggtagtaatatacatggaattagttgcactgcaaataattatttgaaacaggcctggaacgatataaaaaatgagtacgaaaaaaatcaaacatattcaatcacgctttttgaaaacacactggtgtgttttatgcggttatacaatgaactcagacgtaaagtaaatgaagaggatactccatgtctggaatgtgaatcactagaaaaagaatttgaggaaatgcagaatgataatgatctatcattatttatgagaacattgcgtactaatgatacacaaatttattcaggggtttcaggaggtattacatatactatacaatatgttcaaaatgttgatattgttagagtgtccttgccgggcagaggttcagagtctatcacagattttaaaggttattattggtatggctttatggaatatattgaaaacattactgcgtgtgatgatattttttctgagtattgtttagatgatgaaaatatgagtatccagccagaacagataaatacgccgggaatatctgatttagatactggttttaaaagaacatgagtattcatgggcgctgggcggccataagacgcaaaagcaagtatacgaagagtttattaaaattgttgataaacaaacgatcgaggctcttgttgatacggcattctataatctcagggaagatgtaaagacgttatttggcgttaatctacaatctgacaacaaaattcaggggcagggtggttttttatcatggagttttttgtcttttaaaaaagaatttattgatagttgcttgaatgacaaaaaatgcatactgcatttacccgaatttatatttaatgataacaaggcacgccttgttttagacaccgacccagagcagaaggttaatgaggtgaaaaatttcctcactgctctttcagatagcatttgctcattatttattgtttacagcaatgtggcatcaatctccttagggaatgaatccttttcaacagatgacgaccttgagtatgggtatttaataaacactggcaatcattatgacgtttacctccctcctgaactttttgctcaggcttacgagttaaacaataaggaaaggaatgcgcaaattgattttttaactcgttatgcaatttaatgacaaaggcatgtgctaaaaaccattgttattagcctcacttctcttattattggtactattgcctctgtattagtaacgccgctgatattctgtttagccacaggtgcaattatcagcggcgtacgcgaggcaggggctaatcaggcatagtttgcgtcaaaccttgcctgtttttgaagatatatatagaaaaacaggcgttcaacaagccattttgcgaacctgttcccggaaaaaagtcatatttctgtcacactctttaatgattgataacaaaagaggtgccaggaatgaacaaaacgctaatcgccgcaactgtggcagggatagttttactcgcttcaaatgctcaggcacaaaccgtaccggaaggctatcagctacagcaagtgctcatgatgagccgccataacttacgtgcgccgctggcgaacaatggcagtgtgctggagcagtcgacgccgaataaatggccagaatgggacgtccccggtgggcaactcaccaccaaaggtggcgtgctcgaagtgtatatgggccattacatgcgtgaatggctggcagagcaggggatggtgaaatcgggggaatgcccgccgccggacaccgtttatgcctatgccaatagtctgcaacgtaccgttgcgaccgcacagttctttattaccggcgcattcccggggtgtgatattcctgtgcatcaccaggaaaaaatgggcactatggacccaacctttaacccggtgatcaccgatgattccgccgcattcagtgaacaggcggtggcggcaatggagaaagagctcagcaaactccagcttaccgacagctaccagctactggaaaaaatcgttaactataaagattcccctgcctgtaaagagaaacaacagtgttcgctggtggatggcaaaaatacctttagcgccaagtatcaacaagaaccaggtgtttccgggccgctgaaagtcggcaactcgctggtagatgcgtttactttgcaatattacgaaggttttccgatggatcaggtggcctggggagaaatcaaatctgaccagcagtggaaggtgttgtcgaagcttaaaaacggctaccaggacagcctgtttacctcaccggaagtggcgcgcaatgttgcgaaaccgctggtcagttatatcgacaaagctctggtcaccgatcgcaccagcgcaccgaaaattacagtgttggttgggcacgactccaacattgcctctctgttaacggcgctggatttcaaaccgtatcagttgcatgaccagaacgaacgcacgccgattggcggcaaaatcgttttccagcgttggcatgacagcaaagccaatcgcgatttgatgaaaattgaatatgtgtatcagagtgcggaacagttacgtaatgccgatgcgttaaccctgcaggcacctgctcagcgtgtgacgctggaattaagcggttgcccgatagatgccaacggtttctgcccgatggataaatttgatagcgtgttgaatgaagcggtgaaataacagaaaactcccccgcgagaagcgggggagtcgctggttaaacgtttttacgttcgatggtctgttcgccccaaaaaagcgaatctttatcggccttagcaaaggctttgactaacacttcatcgctaccttcttcccaaatcttttctgccattttttcgtcgtacccggcgacttcgaaaatggcctcggctatttccggcgacgtattgcgcagagatgcccattcaccgacgtgatgagctttcgcttcttgagttggcatgcgtatcctcctgttgaagattagccgttaagtttaactgccagacctgcgacatattccccttgataacgagcaatagacagttcttcctggcttggctggcgtgagccgtcaccgcctgcgatggtggttgcgccgtacggcgtaccgccgcgaacctgtgaaacgtcaaataattcctgcgctgcgtagccaatggggacaatcaccatgccgtgatgcgcaagggtcgtccaggttgaagtaatagtttgttcctgaccgccgccagtaccggtggaactaaagacgctcgccagttttccgtatagtgcgccggaagcccacaggccgcccgtctggtcgaggaaggtacgcatttgaccggacatgttgccaaagcgggtaggtgtaccaaaaataatggcgtcgtaatcggccagttcttgcggggttgcaaccggtgcagtttgcgttttaccgcctgctttttcaaataattgcggcggcatggtttccggtacacgcttaacgacaacttctgcgccatcgactttgcttgcaccctcagcgactgcgcgtgccatcgtttcaatatgtccgtacatggaataataaagcaccagaactttagccatttctaaccactcctcgtgttatctctattccgtagcgattcgctaccacttatttaaagataagacgtccttttcagagtgcaaatttcacaaccacttatttgatttataacaactttcacaagcacgtaattttgtcgcaaaatgacacatttttatctcatcgcgtttttttaatcataagagcggcttatggataattattggagatgatatctattctcgctaagaagctgttgcaggatattaccaaacgcgggtctacccgcgtcagttcactaagcttagtcccacgtagcgaaaatatggcagccgccatacgccgcgttaattctatgcaatatgatgtctatacccagacggaggtcagtaatggcaaaccatcgaggcggttccggcaattttgcagaagaccgcgaaagagcatcagaagcaggtaaaaaaggtggacagcacagcgggggtaatttcaagaatgacccgcagcgcgcatctgaagcaggtaaaaaaggtggcaagagcagtcacggcaaaagcgacaactagccgggctaatcaatgacgaatgcatttttgtctgtagctcgtcaaaaagccatcaccgccggttacccggtggttgatactgatgacaaatgtaagcttgcctgatgcgcgatgcttatcaggcctaccagaagattgcaatatattgaatttgcactgttttgtaggccggataaggcgtttacgccgcatccggcatgaacaatgcgtacgttgtcaacaatctgcaccgccgggtaaccccggcggttttctgtttatggctcctgatgaacaacttctggcggtggaacgtcaaccaaccttctacttaacaacgcattgagtaaaatcgcgccaaaggtggctgtaccgatccctcccaacgtaaaaccgcccagcgtgagagcaaaatcacccgcgcccagcactaaggttactgcgaccataatcaaattaccgttctggcttaaatcgacacggttttgtacccagatccttgcgcctgcgacggcaatcagcccgaacacaacaattgatgcaccaccaatcaccgcggccggaatggtatggatcagcgcgccaaatttcggcgaaaagcccaacagcatggcgatgacggcagcagcaacaaacaccagcgtcgagtagacttttgtcacggccatcacaccgatattttcagcataggtggtgacgccgctaccgccgacagagccggaaagcatcgttgccagaccatcaccgacgaatgctcgccccatatacgggtccatattgcgtccggtcatcccggcgaccgccttgagatgacctaagttttccgccaccagaatcaccgccacgggcgcaatcagcatcattgcctgactattaaaagcaggagtggaaaaatgtggcaaaccgaaccaggcagcatggctgacgagagtaaaatcgacggcttttcccagccctaaaacgttggtcatcacgccatacagcagacaggcgacaattaaacctacgagaatcaataaccgctggatcatgccacgggtaaacaccgccaccagcccaatacacagcaccgtcattaccgccatccagctatcaaaggccgaagccgatacacttttcactgcgataggcgctaagttcaggccaatcgccatcaccaccgcacccgtcaccaccggcggcattagtcgttcaatccagcgtgtaccaattttcatcaccaccaggccaatgacggtataaaccagcccacaggcgataatcccgcccagtgcgatgctgatattcgggttaatgccctgaccgttaaagcccgtcgcggcaatcaccacgccgacaaaagccgcgctggagccgagataactggggacgcgcccgccggtaataaagaaaaacagtaacgtgccgatccccgacattaaaatggaaagattgggatccagccccatcagaatcggcattaacaccgtcgcgccaaacatcgccaccgcgtgttgaacgcccattactgccgtctgagcaaacggcaatcgttcatccggcgcgaccacgccgctctctgtagaggtcgattttaactgccagtgaggaaaaccgaacattgccatcagctgtctccttaaggaggttaacaagcagggcgcatcagcgcgtgataactgcgatcgaaccacaccagcccgtagggtgtggtgtgacgatgaatcgcttcgatggcgcaaaacagaatgtcgtgggtgccgacgctcaccacctggctgatgcggcagtcaaacgaaaccagagcctcttccagttgcgggcatccggtcacacccgtctgccagcgggcggcggcaaagcggtgttccatgggcgttttgccgccaaaaagatttgaaagcggctcctgcccggcgctcagtgtatttacacacagcgttcgattttcattgaataccggccagacggacgccccacgattcaggcacaccagtaatgtgggcggcgtgtcggtcacgctgcagacggcgctggcggtgaacccggcgcgcccggatggaccgtccgtggtgatgatattgaccgccgcgcccatacaggacatcgcatcgcgaaaggtttgttgatcaactatgttcatagtttgctccttacaacagcccgcaggcttcttcaaaggacagacgtggcaggcgcgcaaaaagtttgctgctatcgccatagccgatattaatcagcagattgctcttcagcgtgctgcccgcaaaaaaggcgtcgtcaacgtgttgacggtcaaaacccgacatcgggccggtatccagtcccagcgcacggcaagcgacgatcagataggccgcctgcatggagctgttgcgaaacgctgtttcttcggcaagttgtgggctggaggtaaaccaactgcgggcatcaccgtggggaaacagtagtggtaaccgttcataaaattcactgtcccaggcaacgatagcggtgacgggcgcggtcagggttttttgtagattgccgctggaaagcgccgggtgcagacgttcttttccttctacagtgcggataaacacgatccgtgccggagaacagttagctgatgtcggcccccattttatcggggcataaagctcccgtaacgtctcatcgctgacgggtgtctcccgccagccgttgtgagtgcgggcatcggtgaacagggtgctaagcgcacctgggctaacggcttcgttcatagcaattccttacagggcggcttcacggtgatgtaacaggctggcaagcccgttgagtaacagagcattaaacgtttcggggtcggtcacgttgcaggcgtgtccgccatagcgcatcaccattttctggctatcgggcagggcggcatgaagctcactggaacatgctgatggcaccagcagatcatcactggcgcagatgatttgcaccgggcagcggatgcgatccgcatggtgactaaagtcagcgcgtttgagggcgttaagtcgacgcagtaaattatttttgccctgaaaatgcgccagtgccagcgcgtcttctgcctcaaggcaaggtgcgcgggccgccatccagtcggcgggatagaggaacaacggctgcgcttccacccatgcctgcgcgccgccgctatacagtaatcgttcgcgaacctgaaaacagcggcgcgtatgggcgtttattcgtagccagccgttaacgctgatcagcacagttaccgacgcgggataatccagcgccagctgcattcccaccagcgcaccgagcgcatggccgaccaccgcgtaatgctcaatccctgcggctaccagcgcctgatgcagttccgctgccatctgggcgatactgtaatcttctgccagcgtgtcgggattattgccggtgccgcgctggtcgtaacagactacctgatactcctgctccagcaccgccagttgcggtaaccagtaactgccgctaccgccaagacccgaaatcaacaccactacgggcgcatcagcataagggggaggtgagagtgaaagtttcatcgcggcctcacttggcgatatgcgcaattgtggcgatttccaccagcgcgtcaggttttaccagtccgcactgaatgcagaatcgcgccggtttatcacccggaaaaaactcggcgtagatttcgttaatcgcggcgtaatttttccagtcggtaataaagatgctgttgaaggtcacatccgccatcgtgccacccgccgtctcgatcaccttgcggatagtttccagaacgtggcgggtttgcgcctttgggtcatcggcaaacagcacgttattaggtgatgctgccaacttactgatttagtgtatgatggtgtttttgaggtgctccagtggcttctgtttctatcagctgtccctcctgttcagctactgacggggtggtgcgtaacggcaaaagcactgccggacatcagcgctatctctgctctcactgccgtaaaacatggcaactgcagttcacttacaccgcttctcaacccggtacgcaccagaaaatcattgatatggccatgaatggcgttggatgccgggcaactgcacgcattatgggcgttggcctcaacacgattttacgtcacttaaaaaactcaggccgcagtcggtaacctcgcgcatacagccgggcagtgacgtcatcgtctgcgcggaaatggacgaacagtggggctatgtcggggctaaatcgcgccagcgctggctgttttacgcgtatgacagtctccggaagacggttgttgcgcacgtattcggtgaacgcactatggcgacgctggggcgtcttatgagcctgctgtcaccctttgacgtggtgatatggatgacggatggctggccgctgtatgaatcccgcctgaagggaaagctgcacgtaatcagcaagcgatatacgcagcgaattgagcggcataacctgaatctgaggcagcacctggcacggctgggacggaagtcgctgtcgttctcaaaatcggtggagctgcatgacaaagtcatcgggcattatctgaacataaaacactatcaataagttggagtcattacccgttattatgttgatcaaaagccagcgtaccggagacatacaccacgccatcagccagcgtgccgggaacgaagggggccagcggtgcgctgctgccagcgggaataattacggattttggcatcgttaaactccttaagcgatacgagcaaaggacgtgggagaaagcgcgtcgcagaacgtttcgacgtcgctgacccagccaaaaaaggtttcgatattgaacaacgcggctttctgtgcaaattcaggccccgcctggtgtgttgcgtcttccagcaccacgccgaaatactccagaaaaaagccatcgcgtagcgtcgattcgacgcagacgttggtagcgataccggtgaaaaccagatggcgtattccacggctgcgcaaaatgctgtccagcggcgtattgaagaaaccgctgtagcgcggcttcggcagcacaatatcgccaggctgcggcaccagttcatccaccagttgataatcccaggagcctttcgccagcaatttcccctgcagctgcggctgcttacgcatggttttcagggcgttcgatttatgaaaattcggtgagccgggtccgccagcttcgacatactgttcatcccagccattttgaaaccagatgatcagcatccctgccgctcgcgctgcggtcacggcggtttgaatgttggcaatgaccgggcgagtggttgagacatcaaacccggcgagatctaagtagccgcctggcgtggcataagcgttttgcatatccaccacgatcagcgcactttgctgcggatcgaaggtaatggcttccggtcgagcggttaaggtcgtcatcatgccacctcctgagtcagcgcagggagatgggcgcggcactgcatcagtggttgaatgcgctcgccgaaggtttcgattcccgacagaaaatcatcgaaggtcaacagcacgccttcggcaccaggcacgcttgcgacttcatctaacatgcgcgcgacactggcgtaagaaccgactaatgtccccatattgatgtttaccgccgaagtgggatcggccatctgacggacgttggtgtcagtaccggagcgggtatctttctgactttgttcggttagccagcttaacgcctcttcatccgcgcccgctttgtagtgttcccatttggcgcgagcggcatcgtcggtttcatcggcaatcaccataaacaacacataagagccaacgtcgcgcccggtttgctctgcggcctgtttcatccgcacagcggtcggggcgaaagccgtgggtgtatttacgcctttgccgaaacagaagttgaaatcggcatactgagcggagaacgccatgccagcgtcgctttgcccggcgcagatcactttcatggggacactcggttgcggactgacgcgacaatcattcatggtgaaaaaatcgcctttaaaatcgggtaatgactccaacttattgatagtgttttatgttcagataatgcccgatgactttgtcatgcagctccaccgattttgagaacgacagcgacttccgtcccagccgtgccaggtgctgcctcagattcaggttatgccgctcaattcgctgcgtatatcgcttgctgattacgtgcagctttcccttcaggcgggattcatacagcggccagccatccgtcatccatatcaccacgtcaaagggtgacagcaggctcataagacgccccagcgtcgccatagtgcgttcaccgaatacgtgcgcaacaaccgtcttccggagactgtcatacgcgtaaaacagccagcgctggcgcgatttagccccgacatagccccactgttcgtccatttccgcgcagacgatgacgtcactgcccggctgtatgcgcgaggttaccgactgcggcctgagttttttaagtgacgtaaaatcgtgttgaggccaacgcccataatgcgtgcagttgcccggcatccaacgccattcatggccatatcaatgattttctggtgcgtaccgggttgagaagcggtgtaagtgaactgcagttgccatgttttacggcagtgagagcagagatagcgctgatgtccggcagtgcttttgccgttacgcaccaccccgtcagtagctgaacaggagggacagctgatagaaacagaagccactggagcacctcaaaaacaccatcatacactaaatcagtaagttggcagcatcaccttaaaatcgcttttccccgtgccccacaggtcgcgcagcacctgaacatattcggtgagatagtcgtaacgacgggagaaatagtcatcgccaggccagatacccatctgctcatacacgggcttttgccagccagtcacgaggttgacgccaaaacgcccgccagagatggagtcgatggttgcggccatacgggcgacgattgccggaggtaacgttaaggtggcagcagtggcgtaaatctgaatgcgcgaggtcacggctgccagacccgccatcaaggtgaacgactcaaggttgtgatcccagaactcagttttgccgccaaagccacgcagtttgatcatcgacagggcgaaatcgaaatggtaatgctccgctttctgcacaatggctttattcagttcaaaggtcggcatgtactgcggcgcgtgggtcgaaatgagccagccgttgttgccaataggtacgaatacgccaattttcatcatcaacctctcttcgtctcgtaaagtgaaagtcagacggggcgctgcatcctgcatatccttttcagccgcgtattggcttgtttgcaaagcggatgccagtttttaaaaagttaatgttattaatatgttaatattacgttatctaaaatatctgataaaaagtggactaaacggtcaaaacagttgcacataaaacatgcatctgtgcgcgatgagagtgcagaaggtcgaggccgggcgggggttttgctatcctgttgccaatctacaagaggggagagcgcatgacgcaaggcgcagtgaaaacaacgggtaaacgttcgcgcgcagtaagcgcgaagaaaaaagcgattcttagcgcagcactggacactttttcacaattcggttttcacggcacaaggctggagcagatcgcagagttggcgggtgtttcaaaaaccaatctgctgtattactttccgtcaaaagaggcgctgtatattgccgtgctgcggcagattctcgatatctggctggcaccgttaaaagcgtttcgtgaagatttcgctccgctggcggcgataaaagagtacatccgtctgaagctggaagtctcccgcgattatccgcaggcttcgcgcctgttctgtatggagatgctggcaggcgcgccgctgttaatggatgaactgacgggcgatttgaaggcattaattgatgagaaatctgcgctgattgccggttgggtcaaaagcggcaaactcgcgccgattgatccgcagcatttgattttcatgatttgggcttccactcaacattacgccgatttcgcccctcaggtggaggcggtgacaggcgcgacgttgcgcgatgagatatttttcaatcaaacggttgaaaacgtgcagcggattattattgaggggattcgaccacgttaaagatgccggaggaggttgtaacatcctccggctacctgtttaaccgatcgtcattaaactggcgttaccgccagcggcagcggtattcacactcagcgaacgttcgatatacagccgttccagaaggatattgctttcgccacgggcaaaaccctgcaccgaaacaattgcgccatcccgcgcagcaacggcttcacacaatgcgcgaagctgatccgaatcaccgtggaagatcaccgcatcaaagggttgagcggttatattttccgctttcgccagttgaatacgttcgctgactgccgatggcaatgcctttactagctgacgatgcagcgcgtcatccggccacagtacctggctgcccaccgccagcacggcggcgagctgagtcagcgcatcctgctcatcatcggcaatacacaacacgcgctcacgcggcagcagcgtccaggtgttgcgttcacccgtcggccccggcagcaatcgttgtgttcctgcctgcgccagctcgccatattgcgtacataacgcctgcaattctggacgatttgctgcccattcccgcagtgcatttagcggctgagtcaatgcggctttcaactgtgcatcgaccggatactctgcatcctgacgcgcgagcgtcactgccagcgcactttccgggcgattcgccagcagacggtagagatagagcggaccgcctgctttcggcccggtaccggacaacccttcgccgccgaacggctgcacaccaaccactgcgcccaccatattacggttaacatacaggttaccaacatgggccgagccagtgacctgggcgatggtttcatcaatacgcgtatggacaccaagcgtcagaccatagccggaagcgttaatctgctcgatcagctctggtagctggttacggttgtaacgcaccacatgcagcaccggaccaaagacctctttgtgcaattcggcaaagtcatccagttcgatcagcgtcggggcgacaaaggtgccgctttgccattcacgggcatcttcgctgttttcccgcaccgcctggaacaccggacggcctttgctacgcatggtctgaatatggcgctcaatattggctttcgcttcgctatcaatcaccggaccgatatcggtggtcaggcgacccggattacccatccggcattcggccattgcaccgcgcagcattttcaacgtgtggtcggcaatctcatcttgcaggcacagcacgcgcagtgccgaacaacgctgacccgcactgtcgaacgccgaggccagcacatccacgacgacttgttcggtcagtgctgaagaatcgacaatcatcgcgttcatgccgccggtttcagcgatgagcggaatagggcgaccctgagcgtccaggcggctggcgatattgcgctgcagtaacgtagcgacttcggttgaaccggtaaacatcaccccgcgcacgcgatcatcacccgtcagttgcgcgcccacggtttccccctgacctggcagcaattgcaccacgccagggggtacacccgcttccagcaaaatggcgatcccttgcgcggcaatcagcggcgtttgttctgccggttttgccagcacgctgttacctgccgccagtgcggcagcgatctgcccggtgaaaatagccagcgggaagttccacggactgatacacaccacaggccctaatggacggtgggtttcgttagcgaaatcatcccgcacctgtccggcgtagtagtggagaaaatcgaccgcttcgcgcacttcggcaatggcgttactgaaggtttttccggcttcacgcaccagaataccaatcagttgctgcatctggctttccattagcacggcagcgcgatgcaaaatcgccgcgcgttcagccggaggcgtggcaaaccagattggcgcgttattaaccgcactttccagcgcctgttctacttcacgtggcgtggcttcacgcacaaagcccacaatatctttcggttccgcagggttaataacgggcgacatctcacctgccgctaccggttgttccagcattggcaaggcctgccatttttgcagtgcactattgagcagggcagaggagagcgaggccagacggtgttcgttagcgagatccagccctgccgagttgtcgcgcccgtgaccgtaaagatcgcgcggcaggggaattttcggatgcggtaatccagtttgcccttcctgttgcgccagtttttctacagcagtgaccggatcggcgaccagttcatccagtggcaaagaggtgtcggcaatacggttaacaaacgaggtgttagcaccgttttccagcaggcgacgcaccagatacgccagcagcgtttcatgtgtgccaaccggggcataaatacgacacggtcggttaagtttaccgtcggcaactttcccggtgacctgctcgtacagtggctcgcccataccatgcaggcactggaactcgtactgacccggatagtagttctgacctgccagttgataaatcgctgccagcgtatgggcgttgtgcgtcgcgaactgcgggtagattagattcggcaccgccagcagctttttcgcacaggcgagataagaaacgtcggtatacaccttgcgggtataaaccggatagccttcaaggccgtccatctgcgcacgcttgatttcactatcccagtacgcgcctttcaccaggcgaatcatcagacggcgacggctgcgggtggcgagatcaaccaggtaatcgatcaccaacgggcagcgtttttgataagcctgaataacaaaaccgatgccgttccagcctgccagttccggctcgaaacagagattttccagcagatcgagggagatctccagacgatcggcctcttcggcatcgatgttaataccaatatcatactgacgcgccagcagggtgagtgatttcagacgcgggtaaagctcttccattacccggtcatactgggcgcggctgtagcgcggatgcagcgccgacagtttgattgaaatgcccggaccttcatagatgccacgaccgttagacgctttaccaatggcgtgaatcgcctgctgataggaaaccatatacgcctgtgcgtctgcggcagtcagtgcagcttcgcccagcatatcgtaagagtaacggaaacctttctcttccagcttgcgggcattggctaacgcttccgcgatggtttcacccgtgacgaactgctcgcccatcaggcgcatcgccatatccacacctttgcggatcagcggttcaccgcttttaccgataatgcggttcagcgagcgggagaggctggcttcgttatgggtggaaaccagtttgccagtaaacagcagcccccaggtagcggcattaacaaacagtgacgggctacgaccaatgtgtgactgccagttaccgttgctgattttgtcgcgaattaacgcgtcgcgggtggctttgtcgggaatacgcaacaacgcttctgccagacacatcagcgccacgccttcctgcgatgacagcgaaaactcctgcaataacccctggaccattcctgcacgaccactggcatttttttgattacgcagtttatcggccagttgatacgccagtttgtgcgcctgttcagcaactggctgcggcaggcgggcttgttccagcagcatagaaaccgcttcggtttccgggcggcgataggccgcggtgatcgcggcgcgggaaaccgactggggcaatatttgctcggcaaagtcgaggaatggctggtgtggttcctctgccggagtcggtgcttcatcgctctcattggccgcgccagaaagcagcgcaggtagctccggcagagtatcgctgttttccagttgttcgagataagaaaaaatcgcctgcttaattaaccagtgtggtgtgcgatcgatacgtgtcgcggcagacttaatacgctcacgcgtcgcgtcgtccagcttaacccccatggtggtggttcccatgccattactcctgttgttctgaaaggtgcaacttaacgttatcgtgaaatatccatgatgttgcaactttgtgcaaccatgttaaatgtgacttgcgtagcaagcttaaaaatgaatgaaatgttaataaaagaaatcgatatgacagtgattaaaaaataactcagactttttctctgcggcagttaacctttttgaaaggtgcaaccgcaaaaaatgtgagagagtgcaacctgatgaaaaatagtgtcgctgagcactaaaatttaatgtaaatggtgtgttaaatcgattgtgaataaccagcgcttccggcaggatacggtcgccctggtaaaacataaactctgttaccccgttccggtggcagatataacggcaagtttcgacattgccgataataattttttggagactttagatggctattagcacaccgatgttggtgacattttgtgtctatatctttggcatgatattgattgggtttatcgcctggcgatcaacgaaaaactttgacgactatattctgggcggtcgtagtcttgggccattcgtgacggcattatcggcgggtgcgtcggatatgagcggctggctgttaatggggttgcctggcgcggtttttctttccgggatttccgaaagctggatcgccattggcctgacattaggcgcgtggatcaactggaagctggtggccgggcggttgcgtgtgcataccgaatacaataataacgccttaacattgccggattatttcaccgggcgttttgaagataaaagccgcattttgcgcattatctccgcgctggttattttgctgttcttcaccatttattgcgcttcgggcattgtggcaggcgcgcgtctgtttgaaagtacctttggcatgagttacgaaacggctctgttggcgggagctgcgtcgacgatcctttacacctttattggcggtttcctcgcggtgagctggactgacactgtacaggccagcctgatgatttttgccctgatcctgacgccggttatcgtcattatcagtgtcggtggctttggtgactcgctggaagtgatcaaacaaaagagcatcgaaaacgtggatatgctcaaagggctgaactttgttgccattatctcattgatgggttgggggctgggttacttcgggcagccgcacatcctggcgcgttttatggcggcagattctcaccacagcattgtccatgcgcgtcgtatcagtatgacctggatgatcctttgcctggcaggggcggtggctgttggcttctttggtatcgcttactttaacgagcatccggcggtagcaggtgcggtaaaccagaacgctgaacgcgtgtttatcgaactggcgcaaattctgtttaacccgtggattgccgggattctgctgtcggcgattctggcggcggtaatgtcaaccttaagttgccagctgctggtgtgctccagtgcgattaccgaagatttatacaaagcgtttctgcgtaaacaggccagccagaaagagctggtgtgggtaggacgtgtgatggtgctggtggtggcgctggtggcgattgcgctggcggcaaacccggaaaaccgcgtgctgggcttagtgagctacgcgtgggcaggctttggcgcggcgtttggtccggtggtgctgttctcggtgatgtggtcacgcatgacgcgcaacggtgcgctggcggggatgatcatcggtgcgctgacagttatcgtctggaagcagttcggctggctgggactgtacgaaattattccgggcttcatcttcggcagtatcgggattgtagtgtttagtttgctgggtaaagcgccgtcagcggcgatgcaaaaacgctttgccgaggccgatgcgcactatcattcggctccgccgtcacggttgcaggaaaactaagggacttagcctgcggcggttttgtttggcttcagcagcgggttgcgctcccttaatgtgcctcgccatataaattgaatggtgcagggagcgcgcagggggcggccagtcgccgccgccccctgcacccccgggctctggcgaacaaaatcgccgctgcgcggtaccttcagcttatccccttcggctaccgggtcgggcgcgaggtaacgtcctgtaagacgcgccctcagcccacatccatgtgggctgccccggccttcggggaacgtttcagcgattttgacgccaccaacacccgcgctgttattatgttccgggcaaaaagttagatttgataatcgcggatggacgaaattgcttgatacacccgcttatcagttttacatggaagctgtgatgcattgagtctggacagttttgtcggctggataaggcgtttacgcggcatctggcaagaacacatggctcgttgtaaacaatcccatctttgtacctggaataatcgtttatatcccctggtattacctctctttgtttacattccaacatcattttataaacattccgcttgtatttttctttgccgtaatgataatcgctatcactgcgatttacttttctttgcatggattgactcagaaaaacgtttaagggtgggtggcatgtttgttccgtttctcattatgttgcgcgaaggacttgaagccgcgctgattgtcagtttgattgccagctatcttaagcgtacccagcgaggccgatggattggcgtgatgtggattggcgtgttgcttgccgctgcgttgtgcctgggcttgggtatcttcattaacgaaaccaccggcgaatttccgcaaaaagaacaggaactgtttgaaggtatcgtggcggtgatcgccgtggtgatccttacctggatggttttctggatgcgcaaagtgtcgcgcaacgtcaaagtacaactggagcaggcagtcgatagcgcattgcagcgtggaaatcatcatggctgggcgctggtgatgatggtcttttttgccgttgcaagggaagggctggagtcggtctttttcctgctggcggcatttcaacaagatgtcgggatctggccgccgctgggtgcaatgctcggtcttgctactgccgtggtgctaggcttcctgctctactggggcggtattcgcctcaatcttggtgcattttttaaatggaccagcctgtttattctcttcgtcgccgcagggctggctgctggtgccattcgcgcatttcatgaagccggattgtggaaccactttcaggaaatcgccttcgatatgagcgcagtgctctcaactcactcgctgtttggcacgctgatggaagggatttttggctatcaggaagcaccgagcgtcagcgaagtcgccgtctggtttatttatctcatcccggcgctggtggcatttgctctgccaccacgcgcaggggcgacagcgtctcgctccgcgtaacaaatacgacgcaaactcttgcttagttacaacatactttaaagggatagtctcgtcatgaccattaacttccgccgtaacgcattgcagttgagcgtggctgcgctgttttcttctgcttttatggctaacgccgctgatgtgccgcaggtcaaagtgaccgtgacggataagcagtgcgaaccgatgaccattacggttaacgccgggaaaacacagttcattattcagaaccatagccagaaggcgctggagtgggagatcctcaaaggcgtgatggtggtggaagagcgggaaaatatcgcccctggttttagccagaaaatgacggcgaatttacagcctggcgaatacgatatgacctgcggtctgctgactaacccgaaagggaagttgatcgtcaaaggtgaggcaacggcggatgcggcgcaaagtgatgcgctgttaagtcttggtggtgcaattactgcatataaagcgtatgtcatggcggaaaccacgcagctggtgaccgacaccaaagcctttaccgacgcgattaaagcaggcgatatcgaaaaagcgaaagcactgtatgcgccgacgcgccagcactatgagcgcattgaaccgattgctgaactgttctccgatctggatggcagcattgacgcccgtgaagatgattacgagcaaaaagccgccgacccaaaattcactggtttccaccgtctggaaaaagcattgtttggcgacaacaccaccaaagggatggatcagtacgctgagcagctttatacagatgtggtcgatttgcaaaaacgcatcagtgaactggctttcccaccttcaaaagtggtcggcggcgcagccggactgattgaggaagtggcagccagcaaaattagcggtgaagaagatcgctacagccacaccgatctgtgggatttccaggctaacgttgaaggctcgcagaaaattgtcgatttgctgcgtccacaactgcaaaaagccaacccggaactgctggcaaaagtcgatgccaactttaaaaaggtcgataccattctggcgaaataccgtactaaagacggttttgaaacctacgacaaattgaccgatgccgaccggaatgcactgaaaggaccgattactgcgctggcggaagatctggcgcaacttcgcggtgtgctgggactggattaagcgttatgcagtataaagatgaaaacggcgtgaatgaaccgtcacgccgacgtttactgaaagggattggtgcgctggcgctggcgggaagttgtccggtcgctcatgcacaaaaaacgcaaagtgcaccgggcacgctttcaccggatgcacgcaatgagaaacagccgttttatggtgagcatcaggcagggatcctgacgccacaacaggccgcaatgatgctggtggcgtttgatgtgcttgccagcgataaagccgatcttgagcggttgtttcgcttgttgactcagcgttttgcttttctgactcagggcggagcagcaccagaaacgccaaatccgcgcctgccaccactcgattccggcattcttggcggctacattgcgcccgataatctcaccatcacgttatcggtgggtcactcattgtttgatgagcgctttggccttgcgccacagatgccaaaaaagctgcagaagatgacgcgtttccccaacgactcgctggatgcggcgttatgtcatggtgatgtgttgctacagatttgcgccaacacccaggacacggttatccatgcgctgcgcgatatcatcaaacacacgccggatttgctcagtgtgcgctggaagcgggaagggtttatttccgatcacgtgtcgcgtagtaaaggcaaagagacgccgattaatttgctgggtttcaaagacggcactgccaatcccgatagccagaatgataagttgatgcaaaaagtggtgtgggtaacggcagatcagcaggagcctgcgtggacaatcggtggcagctatcaggcagtacgcttgattcagtttcgagtggaattttgggacagaacgccgctgaaagaacagcagacgatttttggccgtgataagcaaaccggtgcgccgctgggaatgcagcatgagcatgatgtgcctgattacgccagcgacccggaagggaaggtgattgcgctggacagccatatccggctggcgaatccccgcacggcggagagtgagtccagcctgatgctgcgtcgcggctacagttattcgttgggggtcaccaactccggacaactggatatggggttgctgtttgtctgctaccaacacgatctggaaaaaggcttcctgacagtacaaaaaaggctcaatggcgaagcgctggaggaatacgttaaacctatcggcggcggttattttttttcgctgccgggagtgaaggacgcgaacgattatctcggaagcgcgttattgcgggtttaatgtttttaggcggataaggcatttgtgcgcagatgcctgatgcgacgcttgcgcgtcttatcatgcctacaatcagtgcgggtttggtaggctggataaggcgttcacgccgcatccggcgatcgtgcactgatgcctgatgcaaatcctgctgaaagcacacagcttttttcatcactgtcatcactctgtcatctttccagtagaaactaatgtcactgaaatagtgttttatagttaaatataagtaaatatattgttgcaataaatgcgagatctgttgtacttattaagtagcagcggaagttcccggcagtgatagtcagtcactatggagatcgcggatggtaacgtcctgtactggacatgttttagataatcaacgcgccaccactcgcggagttttctcctccggtagtcatctcgtcactttgcattttcaacctcatcctttcttttcatgtgttaccgacgccgtaaacggtgcgcgtagccgtttttcggcattttatccaaaagcaaactatggcttacaaggaagccaaccctctgatgttcgtgcgcataatcgcgctgccaacggcgcgtgtgatgaatacaaacaactcaaggtgctctctatgggaagacaaaaagcagtgatcaaagctcgtcgcgaggcaaaacgtgtgctgagacgggattcgcgcagccataagcagcgtgaagaagaatcggtcacctcgcttgtgcagatgggcggcgtagaagccattggtatggcccgcgacagtcgcgatacttcgcccatcctcgcgcgaaatgaagcgcaattgcactatctgaaggctattgagagtaagcagctgatattcgccacgggcgaagccgggggcggaaaaacctggatcagcgcagcaaaagcggcagaggccctgatacataaggatgtcgacaggattatcgtcacccgtccagttctgcaagccgatgaagatcttggcttcttacctggagatatcgcagaaaagtttgctccctattttcgcccggtctacgacgtgctggtccggcgcttaggggcttcctttatgcagtactgcctgcgaccggaaatagggaaggtggaaattgcgccgttcgcctatatgcgtggacgtacctttgaaaatgcagtcgtcattcttgacgaggcgcagaatgtgactgccgcgcaaatgaaaatgtttttaacccgcctcggggagaacgtgacggttatcgtcaacggtgatatcacgcaatgcgatttgcctcgcggcgtgtgctccggattaagtgacgcgctggaacgtttcgaagaagatgaaatggttgggatcgtccggttcggtaaagaggactgcgtacgttcggcactttgccaacgtacgctgcatgcctacagttaagtgtgttatcggtgcagagcccgggcgaaccgggctttgttttatttcaacagattttcacttcaggttagcgttcaggggggcgactttgagcgtgttgataagctgaactggagtctggtttagatactcttaccaggcatttttcgtcatagcatcagaccagtgtaatactgccagcgcggagagtttttcttccagaagccaaaaaaatgagcatctgcctatcttttttcggccattcaacctgtacaggagatctggtgccaattttgcttatgaggtttaatcaacaatgggctatactttgactgactgtttaacaccgaatatattcctctgatttattctttagggataatattataaatgtaaggttaatcttaattaattctttgctaatattgtgtgttgttatttttttgtggaaggcaagccgcaatggctaaatagggatggttgtaataatcaaaacatgatactaactatatattgatcgttgcattgttggcatgtaacacgctgcagcgagtaacattggtaatgaaatataatcaacatggataggtgaaaattaattatgagctttatggcttttgtaacttgtttgacaattgcatttatcgccggttttgctgttgccagaaaattgacactccgaaaagttgcctcatcggtaatcatcgctaaatcgcaacccgtcccttcatctgcaacttcccctgccgctaaggcgtcgacaaggagctatataccgcagaaaacctatcgtgactctcgttggcaagagcgagatgagttatttcagggaatggttgccgaaggtattttattggaaagaaaagagtggttaatcacgcgttgtgaaaaaatgtatttcgataatctggaaaaatggtttggacattattgtcatatccattgccaggtctctctggggcgcttgatcaactttccagaacaacctgagtttagcgaagaagaaagaaagcgtttctttgcaatttataatggcatggcaatggattatgttctggtttcaaagaagaacaataaaatagtctgtgttattgagctggatgacccgagtcatgaaagggcggatcgcattattcgtgaccgttggttggatacaattatgactcttgcacgggtgccttttgtacgagcttctgtcactaaattggaggaaattcctccggtctgggagactcgtgacaaaattcgcccattagtcgcggcgacaaagagtgaaccggtgcattaactaagtatcccggtcggggcttctcatccccccggtgtgtgcaatatacgaaaaaaagcccgtaccttcgtacgagctcttctttaaagatggcggtgagggggggattgactcgcttcgctcgccctgcgggcagcccgctcactgcgttcacggtctgtccaactggctgtcgccagttgtcgaaccccggtcggggcttctcatccccccggtgtgtgcaatatacgaaaaaaaagcccgtactttcgtacgagctcttctttaaatatggcggtgagggggggattcgaacccccgatacgttgccgtatacacactttccaggcgtgctccttcagccactcggacacctcaccaaattgtcgttcctgtcttgctggaacgggcgctaatttagggaaatcatgacctgaggtcaacaaactttttgaaaaaatcgcgcgtttattcaaacttcaatcaatgtgtggttttaataagcgaaatctgctttttttgccaccgaccacggatttgttatgctggtggcctttgtagatcataacgataagtgcgaataaatttcgcacaacgcttttcgggagtcagtatggatatcatcttttatcacccaacgttcgatacccaatggtggattgaggcactgcgcaaagctattcctcaggcaagagtcagagcatggaaaagcggagataatgactctgctgattatgctttagtctggcatcctcctgttgaaatgctggcagggcgcgatcttaaagcggtgttcgcactcggggccggtgttgattctattttgagcaagctacaggcacaccctgaaatgctgaacccttctgttccactttttcgcctggaagataccggtatgggcgagcaaatgcaggaatatgctgtcagtcaggtgctgcattggtttcgacgttttgacgattatcgcatccagcaaaatagttcgcattggcaaccgctgcctgaatatcatcgggaagattttaccatcggcattttgggcgcaggcgtactgggcagtaaagttgctcagagtctgcaaacctggcgctttccgctgcgttgctggagtcgaacccgtaaatcgtggcctggcgtgcaaagctttgccggacgggaagaactgtctgcatttctgagccaatgtcgggtattgattaatttgttaccgaatacccctgaaaccgtcggcattattaatcaacaattactcgaaaaattaccggatggcgcgtatctcctcaacctggcgcgtggtgttcatgttgtggaagatgacctgctcgcggcgctggatagcggcaaagttaaaggcgcaatgttggatgtttttaatcgtgaacccttaccgcctgaaagtccgctctggcaacatccacgcgtgacgataacaccacatgtcgccgcgattacccgtcccgctgaagctgtggagtacatttctcgcaccattgcccagctcgaaaaaggggagagggtctgcgggcaagtcgaccgcgcacgcggctactaataaagcatcaggattcctgctatccttggcgggaattgaatacaggagagagttatgtatcccgtcgaccttcatatgcataccgttgccagcacacatgcatatagcacattgagtgattacattgcccaggccaaacaaaagggcattaaactttttgcgatcaccgatcatggcccggatatggaagatgctccgcatcactggcacttcattaacatgcgtatctggccgcgagtggttgatggggtagggatcctgcgcggcatcgaagctaacattaaaaatgttgatggtgaaattgattgcagcggtaaaatgtttgactcgctggatctgattattgccggttttcatgagccggtttttgcaccacatgacaaagcgaccaatacacaagcgatgatcgccactatcgccagcggcaatgtgcatataataagccatcccggaaatcccaaatatgaaatagatgtgaaagccgttgctgaagcagccgcgaaacatcaggtggcgctggaaatcaataattcttcatttttacactcacgtaagggcagtgaagacaactgtcgtgcggtagccgcagcggtacgtgatgctggaggttgggtggcattaggctcggattctcacaccgcgtttaccatgggggaatttgaagagtgtcttaaaatcctcgacgcggtagattttccgccagagcgcattttgaatgtttctccgcgccgcttactgaacttccttgaatctcgcggtatggcaccgattgcggaatttgcagacctttaattactagtaatggaaatatattaatgaacgagttttctatcctctgtcgtgtgctgggttcgctctattaccgccaaccgcaagatcctttactggtgccgctgtttaccctgattcgtgaggggaaactggctgcgaactggccactggagcaggatgagttactgacgcgtttacagaaaagctgtgatatggcgcaagtctctgccgattacaatgcgttgtttatcggcgatgaatgtgcagtgccgccatatcgtagcgcatgggttgaggacgtaacggaagcggaagtgcgcgcttttctttccgaacgagggatgccactggcggatacgccagccgatcacatcggcacattgctgcttgcggcttcctggctggaagatcagtcaacggaagatgagagcgaagcactggaaacactgttcagtgagtatctgttaccctggtgtggtgcgttcctcggcaaagtggaggcccatgcaaccacgcctttctggcgcaccatggcaccgctaacccgtgatgccattagtgcaatgtgggacgagctggaagaagattctgaagagtaaatgtgatcatcgtcactcataactgcaacagataatttgttgttgcataaaatgtgtgctcgatctcattcatggccgcgttttctgctatcatgcgcggcatgaacatacttctctctattgcaatcacaacaggcattctctccggtatctggggatgggtggctgtttccctgggcttactaagctgggcgggcttcttgggctgtacggcctactttgcctgcccgcaaggtgggctgaaagggctggcgatctccgctgcaaccctgcttagtggcgtggtgtgggcgatggtcattatttacggtagtgcactggcaccacatctggaaattctcggttatgtcataaccggtattgtggcgtttctgatgtgtattcaggccaaacagctgctgctttcatttgttccggggacgtttataggcgcatgcgcgacgtttgccgggcagggtgactggaaactggtgttaccttcgctggcgcttgggctggtatttggttacgcaatgaaaaacagcggcctgtggctggcggcgcgtagtgcaaagacggctcaccgtgagcaggaaatcaaaaataaagcgtgaggggcactcacgctttcgcttaaacagtaaaatgccggattattaattccggcatttttatctgtcaggattctggtggaaccgacatatggcggtatttaaccagaatgtcattctgccgttctgctttgttctgcaaatcccacagaccacggtcgataccatcattaatcaggaaaatgacccctgtttcgatagccgacatcagacacagcataacgggttcgtttgaggtgtaacccacttccccttccagcaagcgctggtagtcaataaagcggaaaaccccggcctgaacttcataggaaagtatcgtcttactggtgttcaccgaggagaggatctcaccggtactcacattgacgacacgcaggttcacggcaatctgatcgagctggtattgcgtgtctgcaccgatcccaaaatatcttgccccaacaccgcccgatttaacgttgctttcataaccgataatcgaaccttcaaccatgatatttgccgccgttaaagattgcagcgggattcggttattaatggcaactgtgccgttttcttgtgccgcacgaataatcttgcgctcgttaagcaggttttgtaaactctgacgctccagcggtataaaccagcgagaatctttcaatgccgtgaccagcattgccgtggcgctttgcggaacagcagtggagaagttacttgccgggtagggtttaaattgcccggtttcgtcctgaatgttgtataccgaaacaaagatcttacccgtcggcgctggcagatgggtcaaatctttgtagctctgagctcgaggcattaatgtcggtctggcggcttctttaggcggggcggttaagcatccgctcagtaacatgacggcaaccaaaagaaataagcgctgcatgattattttccttatgaagctggggcttaaaaatcggttgagttattttgtaaacccgaaacctggatggtcgaggtttgtccggttttacgatctgtcacgttcaactgcaattgaccatcgcggttagcaatatcaacaatataatcgttggtcaccatgcggcccggtttaccggtattaatattcgacagtagcccacctaaaatttgtgactggatggcctgagtaaagttatctaacgctgagggtgtttcaataccaaagtcatcgttatagctcggatctttataagagttttgggcctgagcgctatttaataaaaaagcgccattatttgggttaccaccaaagtttggattacggaactggaaagtcatggttccagcccaacttaatggcgaaataagcatgagtagaactactgcatgtttgacacgcattgcagcctccgaacaattttttatttagaattcatcatgcgccaaatcgcccgtacttaataacgcctgatttatctggcgacgatttagtgcttcttcagtttgaatcagtgcaaagacgacagttttctcgaagtctcttttcaacggaaataaaaaagtctggaaaataacgtcctgattgaccgttatagtgatccagcttccccatcgtgcactgggcctttcattaatcgttaagttacccgtatagtcactttcccatttatcactaaaggctcggtaaaaatcatggccaatagatgaaacagtatggtcagttagcaatcccgggacttctacctcaacggcgtgaagattccctgcggcgaacagaaattctgccgccacaatccagcgtaaataacgtttcatggctttatcgcctgaggttatcgtttgcccaggaaaccgcttgtgtccggttttttacggctatcttcttgaaaagattataaagatgcgttttaaccgtattttcgctgatgaacaacgaacgagcgatctcgttattagacgcgccgatacgcagtttattcaggatctctttttcccgatgagtaaggagggctgattccgtgctgttataacgatagttacctgaatgcgtaatcaagtagctggcaagcttttgcgtaaagtagcattcgccgcgcaggacgccttgcaacccattgacaacacgttcttgatcctccatggcataaaaaacgccgttgatatgaggccagttttcaatgtcgcggtacgggtaatcttcaggcgtatttagcaacaatattttgatattgttgtttttcctgctcaaagtatcctgccaataatggataagctttttatccgcttccatcatatccagaagaataatagagcctgaagatatatcgtccagagggtgatgctgccaacttactgatttagtgtatgatggtgtttttgaggtgctccagtggcttctgtttctatcagctgtccctcctgttcagctactgacggggtggtgcgtaacggcaaaagcactgccggacatcagcgctatctctgctctcactgccgtaaaacatggcaactgcagttcacttacaccgcttctcaacccggtacgcaccagaaaatcattgatatggccatgaatggcgttggatgccgggcaactgcacgcattatgggcgttggcctcaacacgattttacgtcacttaaaaaactcaggccgcagtcggtaacctcgcgcatacagccgggcagtgacgtcatcgtctgcgcggaaatggacgaacagtggggctatgtcggggctaaatcgcgccagcgctggctgttttacgcgtatgacagtctccggaagacggttgttgcgcacgtattcggtgaacgcactatggcgacgctggggcgtcttatgagcctgctgtcaccctttgacgtggtgatatggatgacggatggctggccgctgtatgaatcccgcctgaagggaaagctgcacgtaatcagcaagcgatatacgcagcgaattgagcggcataacctgaatctgaggcagcacctggcacggctgggacggaagtcgctgtcgttctcaaaatcggtggagctgcatgacaaagtcatcgggcattatctgaacataaaacactatcaataagttggagtcattacccgtccagagaacgttgaatattatgtaattttcctgtaattgccagcgattgtttaaggtgctgcaagagagccgtcgcctgcaaagaaggtttagtgatcaacaataatgtatgaccatgaatactatggacttcattaaacatgatgaaaccccgctttttttattgatcgcacacctgacagctgcctctaaaatagaagcaccagaagtactgacagatgttgcactgctgtgtgtagtaataaatcagccctaaatgggtaaaatataaaactaatggattacatctgatttcaatctagccattacaaatcttaaatcaagtgttaaacatgtaactaaatgcaactcgttatattaaaatgttaatcttaaggttttattaagtttagaaatgatagaaaagttgtacatttggtttttattgcacaattttaaaaaatcatacaaatggtgataacttactaataatgcatataaaaaatatttcggtgtagtcctttcgtcatgtaaaaagttgttgttttttctccacacctccgtggacaaatttttactccaaaaagacgaggtttgtcacggcttgtgcgcaagacatatcgcagcaatcagcgatgggcaagaagaatgactgtctggtgatttttgatagcggaaacggagatttaaaagaaaacaaaatattttttgcgtagataacagcgtatttacgtggcttttaatactttggtatgaacaaaaaaagaaaaatacaacgcgcgggtgagttattaaaaatatttccgcagacatactttccatcgtaacgcagcgttaacaaaatacaggttgcgttaacaaccaagttgaaatgatttaatttcttaaatgtacgaccaggtccagggtgacaacatgaaaaacaaattgttatttatgatgttaacaatactgggtgcgcctgggattgcagccgcagcaggttatgatttagctaattcagaatataacttcgcggtaaatgaattgagtaagtcttcatttaatcaggcagccataattggtcaagctgggactaataatagtactcagttacggcagggaggctcaaaacttttggcggttgttgcgcaagaaggtagtagcaaccgggcaaagattgaccagacaggagattataaccttgcatatattgatcaggcgggcagtgccaacgatgccagtatttcgcaaggtgcttatggtaatactgcgatgattatccagaaaggttctggtaataaagcaaatattacacagtatggtactcaaaaaacggcaattgtagtgcagagacagtcgcaaatggctattcgcgtgacacaacgttaatttccattcgacttttaaatcaatccgatgggggttttacatgaaacttttaaaagtagcagcaattgcagcaatcgtattctccggtagcgctctggcaggtgttgttcctcagtacggcggcggtaaccatggtggtggcggtaataatagcggcccaaattctgagctgaacatttaccagtacggtggcggtaactctgcacttgctctgcaaactgatgcccgtaactctgacttgactattacccagcatggcggcggtaatggtgcagatgttggtcagggctcggatgacagctcaatcgatctgacccaacgtggcttcggtaacagcgctactcttgatcagtggaacggcaaaaattctgaaatgacggttaaacagttcggtggtggcaacggtgctgcagttgaccagactgcatctaactcctccgtcaacgtgactcaggttggctttggtaacaacgcgaccgctcatcagtactaatacatcatttgtattgtcagcgccagtgatataagacggtaattcgccatttggattgtccgctccacccaacatgttgtttccttaaggttctcacaccagaaaggacatcaacatgctgagcagagaggacttttacatgataaagcaaatgcgccagcagggcgcgtacatcgtcgatattgcgactcagattggttgctctgaacggacggtcagacgctacctcaaataccctgaaccgccagccagaaagacccgccacaaaatggttaagctgaaaccgtttatggattacatcgacatgcgcctggcagagaatgtctggaatagcgaggttatcttcgcggagattaaggcaatgggttatacgggcggacgttccatgctgcgttactacatccagcccaaacgtaaaatgcgtccgtcaaaaagaacagttcgcttcgaaactcagcctggataccagctccagcatgactggggcgaagttgaggtggaggttgccgggcaacggtgcaaagttaactttgcggttaatacgctggggttctcccgcagcttccatgtcttcgccgcaccaaaacaggatgctgagcatacctacgaatcactggttcgcgccttccgctacttcggtggttgtgtgaaaacggtgctggttgataaccagaaggctgcggtgctgaagaataacaacgggaaagtcgtgttcaactccggattcctgttgctggctgaccactataacttcctgccacgggcatgccgtccacgcagggccagaacaaaaggtaaggttgagcggatggtgaaatacctcaaggagaacttcttcgtccggtaccgcaggttcgacagcttcactcatgtcaatcaacaactggagcaatggatagccgatgtggctgacaaacgggagcttcgccagttcaaagaaacgccggaacagcgcttcgcgctggagcaggaacatctgcagccgttaccggatacagacttcgataccagttacttcgatatccgccatgtgtcctgggacagctatatcgaggttggtggtaatcgttacagcgttcccgaagcgctgtgtggtcagccggtatcgatacgaatatcgctggatgacgagttgcggatctacagtaatgagaaactggtggcctcacatcgcctctgttcagcatcgtctggctggcagacagtgccggagcatcacgccccgctctggcagcaggtcagtcaggtggaacatcgaccactgagtgcctatgaggagctgttgtgatgcatgaactggaagtcctgctgagtcgcctgaaaatggagcatctgagttatcacgttgaaagcctgctggaacaggcagctaaaaaagagctgaactaccgggagttcctgtgcatggcgctacagcaggaatggaacggcaggcatcagcgcggtatggagtccaggctgaagcaggctcgtctgccgtgggtcaaaacgctggagcagttcgactttaccttccagccgggcatcgaccgtaaggttgtccgggaactggctggtctggcgttcgtggagcgcagcgaaaacgtgatcctgctgggccctcctggtgtcggaaaaactcatctggccatagctcttggcgtgaaagcggtggatgcgggacatcgggtactgtttatgccactggacagactgatcgcgacactgatgaaagcgaaacaggaaaaccggctggagcgtcagctacagcaactgagttatgcccgggtgttgatcctggatgaaatagactatctgccgatgaacagagaggaagccagtctgttcttccggctactgaaccgtcgatatgaaaaagcgagcatcatactgacgtcaaacaaagggttcgcagactggggagaaatgttcggagatcacgtactggcaacagcgatcctggatcggttgctacatcactcaaccacgctgaatatcaaaggagagagttaccggttaaaagagaaacgtaaagctggagtgctgaccaaaaacacaacgccaatcagtgatgatgaaatggtggaaagcggacagcatcagtaacgaaagtatttagcgggcatgaaaatggcaaataacggtcaaacatcgtggcgttgacagtattacagaaacagggcgcaagccctgtttttttcgggagaagaatatgaatgcgttattactccttgcggcactttccagccagataacctttaatacgacccagcaaggggatgtgtataccattattcctgaagtcactcttactcaatcttgtctgtgcagagtacaaatattgtccctgcgcgaaggcagttcagggcaaagtcagacgaagcaagaaaagaccctctcattgcctgctaatcaacctattgctttgacgaagttgagtttaaatatttccccggaagatcgggtgaaaatagttgttactgtttctgatggacaggcacttcatttatcacaacaatggccgccctcttcagaaaagtcttaatttgttgaaatatcgagcataagatgaatctggagagaatggtctgctgcgaatcagccaacctgaaagtatggataacacaaccctcaaggatgactaatcattgaggaaatagaataaatgttcagaccttttttaaactctcttatgctcggcagtttgttttttccttttattgccatcgcaggaagcaccgcgcaagggggtgtgatccatttttatggccaaattgtggaaccggcatgtgacgtcagcacccagtcatcacccgtagaaatgaactgcccacagaatggttctgttccgggcaaaacctattccagcaaagcgttaatgagcggtaatgttaaaaacgcgcaaatagcctcagtaaaagtgcagtatcttgataaacagaaaaagctggctgtaatgaacatcgaatataactaagtttctgaacaacgcacgttgctgagcagaaaaatgcgatttaaccaaaaagcctgctgtacacttaagaaacaagaaggtgtaaggaggcgttatgaaaacgcgtattcatgttgtgcagggtgatattaccaaactggccgttgatgtgattgtgaatgcggctaatccgtcattaatgggaggcggcggcgtcgatggggccattcatcgcgcagcgggtccggccctgctggatgcctgtttaaaagtcaggcaacagcagggcgattgccctacggggcatgccgttattacgcttgcaggcgatcttcccgctaaagccgtagtacacaccgtcgggccagtctggcgtggtggtgaacaaaacgaagaccagcttttgcaggatgcctatctgaatagcctgcgactggtggcggcaaacagctatacgtcagtggcttttcctgcaatcagtactggggtttatggttaccctcgtgcggcagcggctgaaatcgcagttaaaaccgtttcagaatttattacccgtcacgctttacccgaacaggtatactttgtctgttatgatgaagaaaacgcccacctctacgaaagactccttacccaacaaggagatgaatgatttgccccggctggcgagcgcggtgctgccactgtgttcgcaacatcccggtcagtgtggtcttttccctctggagaaaagtctggatgcgtttgccgcccggtatcgtctggccgaaatggcagagcatacgctggatgttcagtattacatctggcaggacgatatgtcgggtcggttactgttttccgccctgttagccgcagcaaagcgtggcgttcgcgtccgtttgttgctggacgacaacaatacgcccggacttgacgatattttacgcttgcttgacagccatccccgcattgaagtccggctttttaatcctttctcgtttcgcttgctgcgtccgcttggttatatcaccgacttttcccgtctcaatcgccgtatgcacaataaaagtttcactgtcgatggcgtggttaccctggtgggaggacgaaatattggtgatgcctattttggggcaggggaagagccacttttttcggatttagatgttatggcaataggacccgtggtagaggacgttgccgatgatttcgcccgctactggtattgcaaatcggtttcacccttacagcaggtgctggatgtcccggaaggtgaaatggcggatcgcatcgagttacccgcctcctggcataacgatgccatgacgcatcgttacttacgccaaatggaatccagtccgtttataaatcatctggttgatggaacgttgccgcttatctgggcgaaaacacgtttattaagtgatgatccggcgaaaggggagggcaaggcaaaacggcattcactgttaccgcagcgcctgtccgatatcatgggctcacccagtgaacgcatcgatattatctcttcctattttgtaccgacacgcgcaggtgtggcgcaactcttacggatggtgagaaaaggggtaaagattgcgatcctaaccaattctcttgccgctaacgatgttgctgtcgtccatgccggatacgcgcgctggcgcaaaaaattgctccgctatggcgtggaattatatgaactcaagccgacgcgtgaacaaagtagtacgttacacgatcgcggcataaccggtaattccggagccagcctgcatgctaaaacttttagcatcgatggtaaaacggtgtttatcggctctttcaatttcgatccgcgttcaacattgctcaatactgaaatgggcttcgtgatagagagcgaaacgctggcacagttaattgataaacgctttattcagagccagtatgatgcggcctggcagctccgtctggacaggtggggacggatcaactgggttgatcgtcatgcaaagaaagagattattctcaaaaaagaacccgccaccagtttctggaagcgggttatggtcagactggcgtcgatattgcccgtggaatggttattgtaaatgtggcttaacgggctggtgctttatcgttctcacgcttaacaaccggtttaccagaaaacaaaaacttcagtaacgggatgcgtaaatgaatttcatacagaattatcgcaatccctactacgaatatcaggccacagagaaaaccaagccagttggaggtgatgtgcggtgtaatgtatgcgccgaaaaacagcgttaacgggtggtgaaccagatagataaatagcgatgcgttaacaaagtaagtcacccgcgctgactggaagttaagcaaacggtggccaaaggagaagaccacattcaccatccacagaccgaggaccatggtgatcaccgactcggtttcgtacatccaggcatcgccactgccatagcgctggttgagtaaataagcgacaaatgccaatgctgctgcaagggtacagccacgagacggcgtggtaaacaaggctttaagatgagggaaaatgaaagccagtgcaccgaggataaagaacggcaaataaaatagcgtttgcatgacaataaaattgaacatgccattactcagaatgggcggatacacaataaaaatcgttcttcttattaccgcatagccgatgccgaggcataaaaaaatcaccgatagttttaccatcgagaattttttattcgttttatcagaattttctaaattatttctgatgcgtttaaatatccatacgcacagcgtcgtcatgactactaacaccagtaaaaaccacaggtgtgatattaattcccaggccaacgtattatatttgtcatacaatgacagcccaggccaactttccgctttccctttgacgtattgcagcataataaattgcggcaatgtcagtaaggggatggctgttaacatcgggatacctacacgttcgacacgtactttccaccattttttcaagggatagcgtaaaaaaagcatgtaggaaaagtagccggatataacgaaaaatacctgcatgcggaacgagtggatgaagtcattaaaaagggtcagccacaatgacggttcggcgctattcacatgccatgtatggctcgaatagattaaagaaatatgaaaagggatccctaacaacatcagccaggcgcggatggagtcgaggaaatattcacgttgcgcgggtactggattcatatatggttaactaatctcggatttttcgtcttatccctgtcgggttatgcctttaggcttgttgccatagcgacaccgacctgaccgcgccaggcgcaggcttcaaggtttttatgcatagcatcatcgctaccactaaccagaatggaagcgtctgtaagacggttgataaataaaattgctggcaaaccctacacgaagtcgatgcttctgtctttaggagaagcacggaaagtgaaaacggttgcaatcaggtgcttaatccatgagccagcgtgctgaacgataccgggattctgttgtcggaatggctggttatccattaaaatagatcggatcgatataagcacacaaagggggaagtgcttactaattatgaaacataaactacaaatgatgaaaatgcgttggttgagtgctgcagtaatgttaaccctgtatacatcttcaagctgggctttcagtattgatgatgtcgcaaagcaagctcaatccttagccgggaaaggctatgaggcgcccaaaagcaacttgccctccgttttccgcgatatgaaatacgcggactatcagcagatccagtttaatcatgacaaagcgtactggaacaatctgaagaccccattcaaactcgagttctaccatcagggtatgtacttcgataccccggtcaaaataaatgaagtgactgccaccgcagtcaaacgaatcaaatacagcccggattatttcactttcggcgatgttcagcatgacaaagacacggtaaaagaccttggttttgccggttttaaagtgctttacccgatcaacagcaaagataaaaacgatgaaatcgtcagcatgctcggggccagctatttccgcgtgattggtgcaggtcaggtttatggcctttctgcccgcggcctggcaattgataccgccttgccatcgggggaagaatttccacgcttcaaagagttctggatcgagcgtccaaaaccgactgataaacgtttaaccatttatgcattgcttgactcgccgcgcgcgacaggtgcttacaaattcgtggttatgccagggcgtgacacggttgtggatgtgcagtcgaaaatctatctgcgcgataaagtcggcaaactgggggttgcaccgttaaccagtatgttcctgtttgggccgaaccaaccgtcgcctgcaaataactatcgtccggagttgcacgactctaacggtctctctatccatgccggtaatggcgaatggatctggcgtccgttgaataacccgaaacatttagcggttagcagcttctcgatggaaaacccgcaaggcttcggtctgttgcagcgcggtcgtgatttctcccgctttgaagatctcgatgatcgttacgatcttcgtccaagcgcatgggtgactccgaaaggggagtggggtaaaggcagcgttgagctggtggaaattccaaccaacgatgaaaccaacgataacatcgtcgcttactggacgccggatcagctgccggagccgggtaaagagatgaactttaaatacaccatcaccttcagccgtgatgaagacaaactgcatgcgccagataacgcatgggtgcaacaaacgcgtcgttcaacgggggatgtgaagcagtcgaacctgattcgccagcctgacggtactatcgcctttgtggtcgattttaccggcgcagagatgaaaaaactgccagaggataccccggtcacagcgcaaaccagcattggtgataatggtgagatagttgaaagcacggtgcgctataacccggttaccaaaggctggcgtctggtgatgcgtgtgaaagtgaaagatgccaagaaaaccactgaaatgcgtgctgcgctggtgaatgccgatcagacgttgagtgaaacctggagctaccagttacctgccaatgaataagacaactgagtacattgacgcaatgcccatcgccgcaagcgagaaagcggcattgccgaagactgatatccgcgccgttcatcaggcgctggatgccgaacaccgcacctgggcgcgggaggatgattccccgcaaggctcggtaaaggcgcgtctggaacaagcctggccagattcacttgctgatggacagttaattaaagacgacgaagggcgcgatcagctgaaggcgatgccagaagcaaaacgctcctcgatgtttcccgacccgtggcgtaccaacccggtaggccgtttctgggatcgcctgcgtggacgcgatgtcacgccgcgctatctggctcgtttgaccaaagaagagcaggagagcgagcaaaagtggcgtaccgtcggtaccatccgccgttacattctgttgatcctgacgctcgcgcaaactgtcgtcgcgacctggtatatgaagaccattcttccttatcagggttgggcgctgattaatcctatggatatggttggtcaggatttgtgggtttcctttatgcagcttctgccttatatgctgcaaaccggtatcctgatcctctttgcggtactgttctgttgggtgtccgccggattctggacggcgttaatgggcttcctgcaactgcttattggtcgcgataaatacagtatatctgcgtcaacagttggcgatgaaccattaaacccggagcatcgcacggcgttgatcatgcctatctgtaacgaagacgtgaaccgtgtttttgctggcctgcgtgcaacgtgggaatcagtaaaagccaccgggaatgccaaacactttgatgtctacattcttagtgacagttataacccggatatctgcgtcgcagagcaaaaagcctggatggagcttatcgctgaagtcggtggcgaaggtcagattttctatcgccgccgccgtcgccgcgtgaagcgtaaaagcggtaatatcgatgacttctgccgtcgctggggcagccagtacagctacatggtggtgctggatgctgactcggtaatgaccggtgattgtttgtgcgggctggtgcgcctgatggaagccaacccgaacgccgggatcattcagtcgtcgccgaaagcgtccggtatggatacgctgtatgcgcgctgtcagcagttcgcgacccgcgtgtatgggccactatttacagccggtttgcacttctggcaacttggcgagtcgcactactggggacataacgcgattatccgcgtgaaaccgtttatcgagcactgcgcactggctccgctgccgggcgaaggttcctttgccggttcaatcctgtcacatgacttcgtggaagcggcgttgatgcgccgtgcaggttggggggtctggattgcttacgatctcccgggttcttatgaagaattgccgcctaacttgcttgatgagctaaaacgtgaccgccgatggtgccacggtaacctgatgaacttccgtctgttcctggtgaagggtatgcacccggttcaccgtgcggtgttcctgacgggcgtgatgtcttatctctccgctccgctgtggtttatgttcctcgcgctctctactgcattgcaggtagtacatgcgttgaccgaaccgcaatacttcctgcaaccacggcagttgttcccggtgtggccgcagtggcgtcctgagctggcgattgcactttttgcttcgaccatggtgctgttgttcctgccgaagttattgagcattttgcttatctggtgcaaaggaacgaaagaatacggcggcttctggcgcgttacattatcgttgctgctggaagtgctgttttccgtgctgctggctccggtacgcatgctgttccatacggtcttcgtcgtcagcgcgttccttggctgggaagtggtgtggaattcaccgcagcgtgatgatgactccacttcctggggtgaagcgttcaaacgccacggctcacagctgctgttagggttagtgtgggctgttgggatggcgtggctggatctgcgtttcctgttctggctggcaccgattgtcttctcgttgatcctgtcaccgtttgtttcggtgatttccagccgtgccaccgttggtctgcgcaccaaacgctggaaactgttcctgatcccggaagagtattcaccgccgcaggtgctggttgataccgatcggttccttgagatgaatcgccaacgctcccttgacgatggctttatgcacgcagtgtttaacccgtcatttaacgctctggcaaccgcaatggcgaccgcgcgtcaccgcgccagtaaggtgctggaaatcgcccgtgaccgccacgttgaacaggcgctgaacgagacgccagagaagctgaatcgcgatcgtcgccttgtgctgctaagcgatccggtgacgatggcccgtctgcatttccgcgtctggaattcccctgagagatattcttcatgggtgagttattacgaagggataaagctcaatccactggcattgcgtaaaccggatgcggcttcgcaataaaaatgtagttgcctgatgcgctacgcttatcaggcctacatcgttcatgcaatttattgattttgcaagcttttgtgggttaggtaaagcgttcacgtcgcatccggcaaaaacaacgagccaataaaaataccggcgttatgccgtaatgccgatcagttaaggatcagttgaccgatccagtggctgtgtaagaatccggaaacgctcacttgtttccggatttttttatgcacattggacaggctcttgatctggtatcccgttacgattctctgcgtaacccactgacttctctgggggattacctcgaccccgaactcatctctcgttgccttgccgaatcaggtactgtaacgctacgcaagcgccgtcttcccctcgaaatgatggtctggtgtattgttggcatggcgcttgagcgtaaagaacctcttcaccagattgtgaatcgcctggacatcatgctgccgggcaatcgccccttcgttgcccccagtgccgttattcaggcccgccagcgcctgggaagtgaggctgtccgccgcgtgttcacgaaaacagcgcagctctggcataacgccacgccgcatccgcactggtgcggcctgaccctgctggccatcgatggtgtgttctggcgcacaccggatacaccagagaacgatgcagccttcccccgccagacacatgccgggaacccggcgctctacccgcaggtcaaaatggtctgccagatggaactgaccagccatctgctgacggctgcagccttcggcacgatgaagaacagcgaaaatgagcttgctgagcaacttatagaacaaaccggcgataacactctgacgttaatggataaaggttattactcactgggactgttaaatgcctggagcctggcgggagaacaccgccactggatgatacctctcagaaagggagcgcaatatgaagagctcagaaaactgggtaaaggcgatcatctggtgaagctgaaaaccagcccgcaggcacgaaaaaagtggccgggactgggaaatgaagtgacagcccgcctgctgaccgtgacgcgcaaaggaaaagtctgccatctgctgacgtcgatgacggacgccatgcgcttccccggaggagaaatggcggatctgtacagtcatcgctgggaaatcgaactgggatacagggagataaaacagacgatgcaactgagcaggctgacgctgagaagtaaaaagccggagcttgtggagcaagagctgtggggtgtcttactggcttataatctggtgagatatcagatgattaaaatggcggaacatctgaaaggttactggccgaatcaactgagtttctcagaatcatgcggaatggtgatgagaatgctgatgacattgcagggcgcttcaccgggacgtataccggagctgatgcgcgatcttgcaagtatgggacaacttgtgaaattaccgacgagaagggaaagggccttcccgagagtggtaaaggagaggccctggaaataccccacagccccgaaaaagagccagtcagttgcttaactgactggcattacggcgttatgccggtatttttttacggaagaggtatcaaatgcgtttaattgtggtgagcatcatggtgaccttgctgagtggctgtggcagcatcattagccgcactataccggggcaggggcacggcaaccaatattatcccggtgtgcaatgggatgtgcgtgactccgcttggcgttatgtcacaatccttgatctgccattctccctggtttttgatactttactgctgccgatcgacactcatcatggcccgtatgagtgattaacgttcatcccactcatcagctgcagcgtgtccttcctcggtatccagcggtggctcaagctgaaattccccctcgtcccattcatgtaatgtattctcttcctgccactcctggcggatctctatctcatcatagtcgccatcaaaaacactttgcgcggcttcaccgctaagcataggtaaacattcaccttcttccccttcgtcggcaaaaaactcaacttgccacatgatgtcgccgtcctgcaaaacgtatttttgggcattgaactgttgcacattcgcatcttcggcgtcgatgccggggttgtctgcaagaaattcttcgcgtgcagcgtcaatggcttcttcaagcgttgcgtacatggtcatcacgattctccctttgagttgatgaggtttcagggaaaaggatagctgattctccgcttttgcaagtatgaaaggcgaaaaatcagttcgatacctggggtattcgacgacgacgtagactgttccatgaatagactgcgttgaataacactacgccagcggtgacgagaaataccgctctgaaaccgtagttcgctgaaatcgctgctcccatcaatggtccggtaacgttgccaatatcacgaaacgattggttatagctgaagatacgtccggcgatttggttgctcgagttataaactaacagtgtctgtacggcggggagtagtgcaccatcggcggcaccgagcaaaaaacgtaaaatcccaagttgcaatggcgtctgaacgtaagacattgggatcaacagcagtacagaaaagatcagcgccgtaatcaggatcttttcgggtccgattcgatcgccaagtttgccgagtcgtggtgcacttagcagagccgccacgcctggcaccgaggcgatcatgccactgataaaggcgacgttactgacgttacccgccagttcgcggacatacagcgtcagaatgggggcaattgagcccgtcgccacctggatgattaacgtagtgacaaacaggctgagtaccagtttcgggtttttaagtgatgtcaccacttcccgcatgtgcagcatctcttttttgctgatcggctggaatttttctctgatgcaaaacagggtgacgaaaaagcagagtatgagcacactggcggtaataaagaataccggacgtaagccgtagctatcggcgagcaggccgccagccattgggccgagcaacgcaccactaacgccgcctgtggagagcgtacccagcgcccagccgcttttattacgcggtacttgtgtggcgataagagcattagcgttggggacaaatccgccaagtaacccaagaagcgcccgcaggatcaaaaactgccagatattttgtgccagccccatcaacaccatcacgatgcccatgccgagggcagagcgtaatagcatgagttttcggcctttacggtcggcgagtccaccccaaaacggtgaggcgatggccgaaaataaaaatgtaatgctcatatatgctatcttaatgcactacctgataagtgagcctatacaggttattactgtatgtttatacagtattattggtagaagactgtgtagatttggtatagagatgaatagatactattaaggtaacttattgaaatcaataaagattcttgtgcagtctgaatagataacttagcgttatgtctagtcgtttccctctccattcctaaaaagcgctgtatactggcctatacaacgctataaagacctctacatagcgccttgatagctatgtcacaggtacaaaaaagccccctataaaggaggctgtgtagtctattaagggtcttacagggtcttggtccagtgtctgctaacagtccttacagagaggttaagaaccttagctacctgagactgagatagtcccctttccttgtactctaagaccgctctagttgtgtcactcgctataggtcttccaagtaccttaccttgaactctagcacgctctagaccctgtttagtgcgctctctgatacggtttctttcaaactctgcaaaggtactaaatagctgtagaaccaacttaccctctgagcttgaaaggtctttaacgggtaaatctaaacagatgagcttcacacccttatcattaagaagggtcactgtattctgtaggtcgatgttatcccttcccagacggtcaagtttaagaacaacaagggtgtcaccttcttctagcttatggttgaccagattcgcaaatccgtccctatccatagctgacactgaaccagagacaacctcctctataactcgtgacttaggaatatcatagccagccttcttaatggcttgaatctggttctctgtggtggaagtctctactgatacacggcagtaagcaaaggttcgtgacatagatatccctctgggtagtcattaaacggttagtttgtcttgtctataggcattaaagcaaatggtaggtttgttgtctatagctatagtgactcttctatgtagatattaaacggacgtttcttgtcgtgggtcacatagatacttttagggcttctgtcaagtgatattcgtagattttgcaagggggaggtgtaaggctgaaacagggctactaagaacacatacatctaaggctggaaagtacctgagcagatattcttcaagggggtgcccctattaagttgtcaagcatgttatgacccctgcggggtataaaaagtcccgtcgcgcatcatggcgaacagaacgtcgcagcgtcgtctcgccagggcgataagcgcctgattgtgtcgttttccctgactcattttgcgggtgtagtaagccctggagagcggatccctgagcgcggcgaaggccgacaggaacaacgcccgtttgagagctttattaccccgtcgcgagggatgctcaccgcgtattgacgagccggatcgccgagttaccggcgcaaggccagcataagcagcgagatgtgcggcagaggcgaaggcgcggcaggcgacctcggtgaggagtctggctgcggtcctgacaccgactccgggcatactggtcaggaccgggtaaagagggtgagcaagaactcgctgttctacctcaagcgccacctcgtctctttgcttacgcagcgtgatgagctggagtgccagacgtggcagtactacggcagcggcattcgtgccgggaacgacgacggtttgttcggccagtgcctgagctatgtctgctgcaaggcgtttacccagacgaggcgcaagtttgcagagctgggctgccagcttcttctcacccagcgaagcccagcgaagcgagtttttctggtgagggatatcgctggagaagatcgagtaccgccgggtgctcaagtctcggaccgagaacgcgctccagtgccggatgtatctgggtcagaaggccgcggatacggttgctggcctgcgttgtctgtgcggcaagatcatcatcgaagccgcagagcatggagagttcggcgatttgctcgtcagccagtttcagcgtgcgtagcgcgtgaggcagggtacgggcagcttcggcaatgatggcagcgtcacgagcatcagttttagcttcaccggcgtgtaagtcggctatgcggcgcatggccagtccagggaggtatccgacaaggactccttctgagcgggcaacggcgacaggtaacgcaccgatggtagctggctgatcaacaaccagcagtatctgaccatgttgtttcaggtcagatattagcgacctgagtttgttttcgtcgttgggtaatgctttatcgaacaggcgtttacctgaacgattaatggcaacagcgtgatgcgtatctttaccgacatcaacgccgataaagacctggacggattcgtaatcgctggattcggtcattctgtctcccttgtatatgggttaaccagataaccacggggagcaggtaccggcatccacgttacagacggtcccggcaaaagtgcctgacctgacccctattagcggttaccagcgccccaccagacccggtgacatcaccccccggatcatggacgactgggggcagtaatcatgccgggtctggctggctaacaccccattataaggggtacgaataaagtaacggggtaggggtatatataaaggggggtagtctgcgtattccgctctattcgatcacggattggcatcgaagttcgatcagcgattcgcatccattcgatcaaccgggaacttaactttttctaccgctttttaactcgttttttcgctgctttccactgtagggggatttttcctcagggactctccctgaaggaccactctgtgtgagttatgtaccagtctgtccaggatggcatctgctgttgttgggttctccatcagaccatgccatttatctaccgggaactggcttaccactatcgtgctgctttgtccgtaacgatcctctgtgatctccagaaggtcattacactgggcgttacttaactgttccagccccagatcgtccaggattagaacctgtattttttgcaactgtttcagatatttcagccaactgccatcaacacgtccctgagccaactgttccagtaatcgcccggttctacagtaccggacgctgtatttctgtcgacatgcctgttcgcccagcgcattggctatccagctcttaccgcatcctgtcggaccggttatcagtaggtttttcctgtggattatgtagtggccgttcagcagttccctcatctgttcagcccgcagacctcttgaggccggataacgcagcccttccggtgttgcctgatatttcaggcaggcattttttctcaaccgtgccacacgactgttttctctgctcagaagctcgtcatcaaccagcagtgtcagcctttcctcgaacgacagttcgtcgtaagtctgaggcgtttcccgttgccgtatcaggctcccggccatcgccgggagtttcagttgggtcagtttgtttaacagattatcactcatacggttgttccttctgtcagtggtagtagccaggaccacgcaggttttcatgctctgaagcatatgccggatgttgttcgccctggcgggataacggaagctcaacgttatcccgatgatgacgcagcagattgtcgataaagcgtctgtccggggcgttatagtgcagggcaacgtaacaggccttttccagccgttccgggccgtattttttctgaagtgccagcagacccaggactgcacggtaagccagctccggatggggtttggctttcagcatggattcaaccacccggcctgtggacggacctgtacggtttccctgctcgataaggcgttccggtgtccatgtcccatgccgccggtggcgttctggcatgtgaagcggattggttgtgtgtttatattcatgtgtgctgcgcggatgttgcgccacacactgccccttgtgccagagctgtaccaccgactgccccaccttcagtgacagacgctgaccgaccagttcgtgtggaacggagtaccagtgacgggcatattcaacgtggtagtcagggccaaccttcacggctttgtattccgtgtattcataaggctccagaggcagcggagagagtgctggtgcatccagcatgcggaagcgttctgcgcgggtttgattaccgtatcccttcattggtcggttattcatgtccgtcagcaactcccgaaggcgtgcattcagcgccctgagcgtgtggaaggtttcattacggatgcgggcaagaagccatagctcgacgatgaggacgccgttttctgcttttggtttatctttaggtttgcgcgggcgggccgggataataaccgtgccatagtgctcagccagcgcctgataactgtcgttgatgacaggctcatagcgatcggcttttttcactgcgcttctgaggttatcggggatgagcagcttcggtacgccgcccaggaaggtcaggcaacggctgtgggcatttaaccatgacatcatgtcctgaccttcgcacgcttcaacataggtatagttggacgcccccattacagccacgaagattgccacgcggcgtatctctccggtgtccggattaataacagggaccgtaggaccacagaagtcgataaagagcttttcgccagcacgatgctcctgtcgcatggagaggcgtcgcgtttttttccacttccggtagcaacggcagaagtgtgagtatcccatcgctttgtcacccgcctgtgccttgtattccatccacaacagttggcgcgtcacgccaggttttctcatttccgtatcgaagtacagcatgtcaggcataacaagctctgacgcagaggtgtctttgggcgggaaaatgagtttctccagcgtgtcatgggatatatccgcaggtaatggccatgacagagaagaggctttgaagcgggcaagaacctcaaaaacggttgaggcgctgatgtgtaacgtcagtccgatacaacggttagtcagcttcttatcgaacttgagctgaaggatcttaaaacaagtttccatagtgctcctggattttctctttttggacattgacgtctccactggtttaaacacggcaatggagactgtggtgaaaagagttaattcccggagtgactggcgaattccaatcaatgatcggaagtatgccaaatcgtgatcgattgtgatgccaaactgtgatcggagatggatgccaaatcatgatcgattcgaatgccaaactgcgatcgattcagatgccattttgcagtagtctattttataaaaaaattaagtaggctaagaagtaccttagaaatcaattttaaggggtctaaaacgctctgtaacgagctaaactgtataagtggcataagatgccttttagactgacactcgcttagagagcttcctagagcttctgggaggattcattagatatcgttgtatacagagacacagtatctataaagggtattaagagattcttagaagttactgtaaagaaccactaagataagaagagagggacaaagaaccgaaggaaagtcccttattaagtaggagtcttaatagactgtcttaatagataacttaaaagtcttaaaggatatcttccaagaagagaggaacgaagaaccagaggaagtgaccgttgaccgtttgaacagactgtttaagtaaagcctataaagtatctattaattaagggctatgtctcaatactagcagtttgtactagcagtttgtcaatacctttgtctttagcaattcgtgctatttattaaatatagctgttaaaacagagtatgctttttaacctaaaaccttgtcgcttcgctctgggtcacatgttcttgggttcttagtgagagttacactatcttctaaggtactcaataaaaagacgagtaacaaccgaagaacgaggatagaggtattgtaataacttagaaggtgtctgtaaatggatttgcccctatatttccagacatctgttatcacttaacccattacaagcccgctgccgcagatattcccgtggcgagcgataacccagcgcactatgcggatgccattcgttataatgctcgaacgcctctgcaaggttctttgctgccgttaacccgtctggtttgggcatgatactgatgtagtcacgctttatcgttttcacgaagctctctgctattccgttactctccggactccgcaccgccgtgttcttcggttcaagtcccaacatccgggcgaactggcgtgtttcattagcccggtagcatgaaccattatccgtcagccactccactggagacgacggaagatcgttgccgaagcggcgttccaccgctcccagcatgacgtcctgtactgtttcactgttgaagccgccggtagtcaccgcccagtgcagtgcctcacgatcacagcagtccagcgcgaacgtgacacgcagtctctctccgttatcacagcagaactcgaacccgtcagagcaccatcgctgattgctttctttcacggccactctgcctgtatgtgcccgtttcgatggcggtacagcaggttttcgctcaagcaacagcgcattctggcgcatgatccggtaaacacgtttggcattgatcgcaggcataccatcaagttctgcctgtctgcgaagcagcgcccatacccgacgataaccatacgtgggcagctctccgataacatggtgtatacggagaagcacatccgtatcatcagtgtgacgactgcggcggccatccatccagtcatcggttcgtctgagaatgacgtgcaactgcgcacgcgacacccggagacaacggctgactaagcttactccccatccccgggcaataagggcgcgtgcgctatccacttttttgcccgtccatattcaacggcttctttgaggagttcattttccatcgttttcttgccgagcaggcgctggagttctttaatctgcttcatggcggcagcaagttcagaggcaggaacaacctgttctccggcggcgacagcagtaagacttccttcctggtattgcttacgccagagaaataactggctggctgctacaccatgttgccgggcaacgagggagaccgtcatccccggttcaaagctctgctgaacaattgcgatcttttcctgtgtggtacgccgtctgcgtttctccggccctaagacatcaatcatctgtactccaatgactagtctaaaaactagtattaagactatcacttatttaagtgatactggttgtctggagattcagggggccagtctagtgaccgactggcacgtcttcgtaaggagctaaggctacgctgtaagcagaaacgcaagttcagagcgactacgaactcgaaccacaatctgccagttgcgccaaatctgctgaaccagacgttcgctcctacagcaccaaatcaggtctgggtggcggacctgacgtatgttgccacacaggagggatggttgtacctcgctggcatcaaagatgtttatacgtgcgaaattgtcggctacgccatgggagagcgcatgacaaaagagctgacaggtaaagccctgtttatggcgctcaggagccagcgcccacctgccgggctaatccaccactctgatcgaggttcacagtactgcgcatacgattaccgggtcatacaggagcagtctggtctgaaaacatcaatgtcgcgtaaaggtaactgttacgacaacgctccgatggaaagcttctggggaacgctgaaaaatgagagcctgagccactatcgttttaataaccgggatgaagccatctcagtaatacgggaatacattgagattttctacaatcgtcagcgtcgtcactctcgtctggggaatatctccccggcagccttcagggaaaaatatcatcagatggctgcttaaaaaaagaacaaatggtagtgtccgctattgccagtacacctcagtaatcagggttctttgataaccagtcagtgaccagcttagactgtcttcgtatagagtccccttttatctgcttctcagttgaaaacctcatgtagctgatagctcttttcatctcttctctcaggtagtgtatttaggaaggtattatactgaagacaataccggaccacatattcagggcggagtgaccggtaacgccaagctgctcaacgtagaggggtaagaagggcattaccagactgaaggcggcaccggtaagaaaacagcctagccaggcgacgatcaggtttcgtttccagtttataggggtgtcatttccacagggtgacatagcaatccgctgttggtgcgccaggcgcggtgaacataagaagaaaagataagcacactaattatgcgcccgacttccagggggcgcaatccagagagcttttatcgctaaatcagggggatttgctgtggtaatgccggatgccattctgaagcatccggcaggggagatttaatagcgtgaaggaacgccttccgggcgtgttttaaagcgacggtgtaaccacatatactgctctggtgccatcatgatgcatttttcgaccactttgttcatccacgcggcggtagtttcggcatcatccagtggcggagaacactctggcggcagcataatcaattgataccctttgccatctggcttacggcgtggaacgaagggcaccagacatgcgccggacatccgtgccagcatccaggttccggtcgtggtcgcagcctgctcaacggcaaataacgggacgaaaacgcttgagcgcgggccgtaatcatgatccggtgcgtaccagaccacttcgccttttttcagggctttaatcatgccttttaaatctttgcggtcgagcatcgatttatttgagcgcaaacggccccaggtttgtagccagtcaatcagtggattatcgttcgggcggtaaacgccaatccccggttcctgcataccaaactgccgcgcgcccagttccagtgtcagaaaatggatgccaactaacaggatgccgcgtttttgcgcctgcacgtcacgaatgtgttccatgccgatcacttccgtccagcgggcgattcggcggtccggccagaaccacgccataccggtttccatcagtcccatgccaacggattcgaaattcttcaccaccattttacggcgttcttgttcgctcatttccgggaagcacagttccaggttgcgatgcacaatttttgcgcgtcgtttcataaaacgtaacgccagttttcctaatccacaaccgaggcggtagataaccgggtagggcaattgcacgactaaccaaagtacgccaatacccaaccaggttaaccaataacgcggatgaagcagtgcggtggagaacttgggtagattcgtcatatcaatcctgtttttcaacctattcgggcaattgtatgtattgtcgcattttttcgcccgcaaccaaaatttgtggctgaagactgggcgaaattgccgcgcttgtaaataacaaataatttttaatgcgcaaatgtagcgtaaaatgtgtggatgttaattatcgataattgctatatcatgccgcggatttttactttcccatctcgcaggaaccgtacaccatgccagtgttacacaaccgcatttccaacgacgcgttaaaagccaaaatgttggttgagagcgaaccgcgaaccaccatttcgttttacaagtatttccacatcgccgatcctaaggcgacccgtgacgctttatatcagctgtttaccgcgctgaatgtttttgggcgagtgtatctggcgcatgagggcattaacgcgcaaatcagcgtacctgcgagcaatgttgaaacatttcgcgcgcagctctatgccttcgacccggctttagagggtttacgcctgaatatcgcgttggatgatgacgggaaatccttctgggtactgcgcatgaaggtacgcgatcgcattgttgccgacggtattgacgatcctcactttgatgccagcaatgttggtgagtatctgcaagcggcggaagtgaacgccatgcttgacgatcccgatgcactatttatcgacatgcgtaaccactatgagtatgaagtggggcactttgaaaacgcgctcgaaattccggcagataccttccgtgagcagctgccaaaagcagtcgagatgatgcaggcacataaagataaaaaaatcgtcatgtactgcaccggcggcattcgttgtgaaaaggccagtgcctggatgaaacataacggattcaacaaagtctggcatatcgagggcggaattattgaatacgcccgtaaggcgcgcgagcagggcttgccggtgcgttttattggcaaaaattttgtttttgacgagcggatgggcgaacgtatatcggatgagattatcgcgcattgccaccagtgcggcgcgccgtgcgacagccataccaactgtaaaaatgatggctgccacctgctgtttattcagtgtccagtatgcgcggaaaaatacaaaggttgttgtagtgagatttgctgcgaagaaagcgcgttaccgccagaagaacagcgacgccgtcgggcaggacgtgaaaatggcaataagatctttaataagtctcgtggacgtctgaatacaacactgggcattcctgatccaacagaataaatatcattgccggatgcgtgccatccggcaacatttcacgcttacttctgctgtacgccttccactgaaataatcagatccacttcctgagaagctggacctaaatctgtcttgatattgaagtccttgagcttaattttgccttcggcctcgaagcctgcacgtttaccaccccatgggtcgtcgccctgaccaattaatttcgcttccagcgtgacgggtttggttacgccattcagcgtcagatcgccggtaatatccagttcgtcaccgtctttcttcacgctggtggaggtgaatgttgcctgtggatattttgcggtattgaggaaatctgcactgcgaagatgtttatcgcgttcggcgtgattagtatcgacgctggtggtgttaattgtcacattcactttatcggcagccggatttttttcgtcaaaggtaaaagtaccgtcgaaatctttaaaggtgccgtataaccagctatagccaaggtgctggatgcggaaattaacaaaggcgtgctgaccttctttgtcaattttgtaatcggcggcaaccgctgaaccggcagagaacatcagggacgcgaaggttaaaccaagcaggctttttttcattttttatactccatagtcagatgacgactttcccagcatgcgcttcagagtgtcgtctttatcgatgaaatgatgcttcagggccataaatccgtgcataacggacagtactacgacgctccacgcgagccaaaaatgcagggcaccggcaaagtctgcctgtgcgccagcgtcggcaagggtcgcggggacgtcaaaccagccaaaaacgctgatcggtttaccatcggcagttgagatcagatagccgctgatgccgatggcgaacagcaataggtacaatgcgagatgtccagcctttgcggcaagacgagtcatgggcgaataactcggcagcggacccggcggtggagatatgacacgccacagaacgcgaataaccagccccatcattaacaaaataccgatgcttttatgcagttcgggtgctttgtgataccagccatcgtaataactgagcgtgaccatccacagacctaaagcaaacatgccgtagacaataattgcgcttagccaatggaaggccgcagatataacaccatagcgttcaggggtatttgtgaatgacataagtgcatccaatacgaatttgcgagagggtgatgctgccaacttactgatttagtgtatgatggtgtttttgaggtgctccagtggcttctgtttctatcagctgtccctcctgttcagctactgacggggtggtgcgtaacggcaaaagcactgccggacatcagcgctatctctgctctcactgccgtaaaacatggcaactgcagttcacttacaccgcttctcaacccggtacgcaccagaaaatcattgatatggccatgaatggcgttggatgccgggcaactgcacgcattatgggcgttggcctcaacacgattttacgtcacttaaaaaactcaggccgcagtcggtaacctcgcgcatacagccgggcagtgacgtcatcgtctgcgcggaaatggacgaacagtggggctatgtcggggctaaatcgcgccagcgctggctgttttacgcgtatgacagtctccggaagacggttgttgcgcacgtattcggtgaacgcactatggcgacgctggggcgtcttatgagcctgctgtcaccctttgacgtggtgatatggatgacggatggctggccgctgtatgaatcccgcctgaagggaaagctgcacgtaatcagcaagcgatatacgcagcgaattgagcggcataacctgaatctgaggcagcacctggcacggctgggacggaagtcgctgtcgttctcaaaatcggtggagctgcatgacaaagtcatcgggcattatctgaacataaaacactatcaataagttggagtcattacctgatgagatagtgcaacagccgacgcattaaatactcctgtaaaaacggcctcattctggaggccgtaatgatgattattggaagcgggaaagcctgaatggcgtcaaatcaaaatcgctttttttgtcttgcgcaaaatcggcagctatttcccctaaaactgacgcaaatttaaaaccgtgcccactcaggccggtaatgagcagtgtattatcgtggccgggtagggtatcgataataaaatcttcgtcaggcgaattatcataggtgcaggcagcgccgtacaggcagcaaccgatacccggcaatacattgcgcaagaacgggaaggcttccgaaccatcgctgaccacttccgcaaacggaacacgttcatccgctgaatggataacctggcctccgttatgtttgccaatcttcaacgcgtcgttttctgccggaaaaccataatattgatcgccattgggcagttcaccggtaaacgccgggaatttattcttcacgctatagcggccatcggcctgataccaggcaaatactttacgtacgggctggacaggctgctccgggagcaggtcttttacccatgttcccgcgcagacaatcgcttttttcgcctgatactcaccgtcaaccgtttcaatagttacgccatcatcgtcatgacgaattgcggtgaccgggcagttgaacagttgcgcacagcccgcttccttcgccagttggatccaggttttaatcgccagttcgctgcgcaaaaaaccggaatcagtctcaaataagccgatgtagttgtccgggacgcgtatttctggccagcgggccataatcccttgcgcatcgagcttttcaacgttgagttgccactgttcggcgctgtgggcgacgttggcgagaaatgcggagtcagccgggccgaggttaatgacaccagagcgtacaaaaatgggatcatcttcgttgtggcgggaaagttcatcccacagcgtttgcgcgcggaggaccagcgggacatacttttcgccttcaccataagcatggcgaattaatcgcgtatcgccgtggtggctgccgtgttgatgcggtggcatatgggcgtcggtcattagcacgtttaaaccggcgcgggttgcataatacccggcggcagcgcctacggaaccgctgccaataatgatgagatcgtatttcatttttttctctctgctctcatggtttaagcagagtaattaactgaatgcagatatacaacccagaaatggtaaaggcaccggtgaggtgccttttgggtggatggtcatgtcatgttaatgacgccgatactcgtttacctggaaatcaccggattcaattttggcgattcctgcttctaatatcgaaataaattgtctggcaacatcagtggttaaccagagcgtttgaccaacttcagtcccttcctgctcggacttatttggggtctggtagtgcaaacgcaacatcagcgcatcatagctatcaacggtgctgatgtcccaccctacgagcggatgagtctgaatgacttcattatttttttccatcatggccccctaattcgtgttactagacaacgttattcgaggttcaatgcgtttttatctgaagcaacttcagtataccaataagtaagggtattcaccgaatttttaaaggggggaacagataaatttctgcttttaagatttatatgaacaataaaacagcatgtcattcatatttttttagcatattgtgcaattattttgaggaagtgtagaaattttgtactcaaaattcgtaagtaaaataaaaaagccggggcgacccggcaaaaacaaaaatcactgcatattattcgctgacaaaccagtcatcggcgctttcccacgtttcctggagaatttcgctaatgcgctgtttatcttcttttgttgcgccaataaccgataaattattcgctgcggcataacgtaccgatacgtggccttcattatcaggaaacgcatactgaatacggcgggaaagttcgccagccagggcgtcaatagccccagctggcaatggagaagttttcgctatggtgacttcaattcgcataatagccccctgttgaatatactggttatttatacaggttaaataacctaatgacaacaggaagctacgatttttattgtttaacggaccagcgtaccgtttccccggcgaggaatggcaccagggtgtcatcagtcagtgcgatgctttcagcaacctgttgctcttcacgtaccagttcgatgaatgtgtcgttgaccggcaacccatagaactgcgggccgtttacagaacagaatgcttcaaagtgctgcagagcattcatctcttcaaagacggtagcgtaactgcccagcgcggttggggcgttgaagcagcccgcgcagccgcaactgctctctttgcgatgacgtgcatgtggcgcagaatccgtaccgaggaatactcgattaaaaccgctggcgaccagttcacgcaatgcctgttggtgaatattgcgtttgaggatgggtaaacaatacaggtgcggacgcacgccaccaaccagcatatggttgcggttaaacatcagatgctgcggagtgatggtggcagccagccgttcatttccgtcacggacatagtcggcagcatctttggtggtgatgtgctcaaaaacgactttcagcgcagtcaggcgctggcgcagaggttccatcacgctttctataaagcgcgcttcacgatcaaaaatgtcgatatctgcatgtgtcacttcaccatgcaccagtagcggcataccgattttttccatgcgctcaagtaccggcatgattgcgtcaattgacgtcacgccgtggctggagttagtggttgcgtttgccgggtaaagttttgcagcggtgaacacgccttcattaaatccgcgctccagctcattaggatccagcgaatctgttaaataacaggttatcaatggggtgaaatcgtgcccggcaggtacggcgtcaagaatacgttggcgatacgccacggcagcctcaactgtggtcacgggcggagccagattgggcattacgatagcccgtccataaatttcgctggtatacggcacgacagtttttaacatgtcgccatcgcggaggtgaaggtgccagtcgtctgggcggcggatctttaatacctgggatggtgcagtcattaatctctatgctccggctgaaggaatgtttttgccggacacaaaggataagcggaaacgttttcctttgcacgaaaaataaagggcgcgaatgcgccctcgtcattaatccgtaaacggaatgacaatttcgcctggcttcacttcaatgcctttcgccagttttttcgccattgcttcgccctgactgccatcttcgcgcaggacgtaagcaggttgctggttaaagtaattgcgtaatgcctggttcaaatagggaagcaacgtttgcatcaccgtttgcattttttccggttgtaccgtcgcatcgaccacttccatctctttcaggaagatcgcacctttttctttatcaaacacgggcagcgctttcagcttcagtttcatggtcgctttctgactaccgaacagggagttcatgtccagattggcgtctccggttagggtaaccttattcggctcttcgcgaccaatttggctgatcaagtttgtcagaacaatatgggcgtcagccacgccgggtaaaccgatatcttttgagaaattattatgtttcgcaagcgactggttaatttcttgttcggtgatggtgtattgggtgagttgattacagccaacgagcaggccactgacgatcaatgcagcggcaaataaaaacttgttcatggtagtcctcgacatgaaatctgcgtcaatatcctgacacaacgcagcatgtgtcaccagcgataaactcgccagcagaaaaaactgaaaacggcggcaacccgcgaatacaggctgccgcggcgggtcaggattaaatcgccattgatgataacaaattgatttgtgtctgtttcgccatattatcgcggtaatcagcaacgcggcttggccagttgattccggctaccagcgtcagattacgcagtagcggaaatagctgaatatcatcttccgaaagttcgccattcacggcgttcggtttgacgatcagtttgtccagcgcacgcaaatcatcgctgatattcttaatcagaccgtcagagtgggccagcaggtcggcaaaattacccgcgctggcctctttcttgtcgacgaaatatttgcgcgcggcgggagtagaaaactcatcaaatgccgatttggcaaaacgcggcaacagcagtttgttggcgtagccattgaccttgcgcagccactcttcaatggcaggggaacgtttgccggtcagtaacggtttgccgtcgagtttatcgacatagtgaacgatatccatgctttctggcatatagcggctgtcatctttttgcagaatgggaacctgtttttgaccgaccatccgggtgggtgtttctgcgtcgtcgttgagcagaacatgtaattcgacggggatatttttcaggccgaaaatcatgcgggctttgaggcagtaagggcagtgatcgtaaatgtatagcttcacgtgactcctccatttggctgtcagttcactttcagtatggaggagtcaggggggagtatcaaatcaggcgtcgcgttccagcaaacgacgcgttgcgcgtttctgactaaactgccaacccagcgcaaggaaagtgaagatgccaataattcccagcatcatccacggaagctctggctggtgcgccgatttgcccaggtcaaacagccagccaccaccgatataaccaatagcgccgccaatcgccagacccagacggctaaaccccatatagctgccgcgagctcttgcgtccgccagcaaagcacttaaggtttcacgcgcaggctcggcaatgatcgacccgatataaaacagacaaatcagggtgaaaagttgttgcagaccgctgaccatgcccaccggcatcatgcttaatgacattatcaacagcccagccatcaaccggtgttccagacgaaaatgcttttcactccagcgggcgatagggtagagcaacgttaacgacagacacgcttcaatggcatacatccatttaacggcagagggcgcgccagccacgtcgttgaccataattggcagcatcagcatcacttgtacagccagcatgtagtaacccgccagcgtcaggacataggtgacaaaacgcttgtcacgcatcacgcgggtcatgccttcgcgaacgggcgtgcgtacggtggagagtttccatgccggtaacaaccacgcattgaacgccgcacacagcacaaacaaaacggcccctgtggcgcagaccaggcgaaagtcgtattgcaacagccagctccccaacaatgcgccaatgaccgcaccggcactgtcctgcatcatcaacagcgagaaaaaacgacaacgttgttgtggacggattagtttcaccaccagcgccgaacgcggcggatcaaacaacgtgccgccgagtcccgagagcaggcatgaaaaccacaatagccacggttcgtgggcgatacccattgtggcgaatccggcggcgcgcatcagcataccggtaacaatcatcggtttggcaccaaagcggtcggcaattgcgccgccgaaaatacccagaccttgctgaataaactggcgtagaccgagagcaataccgaccatgacggcggcccagcccatttgatcaacgaagcggatagagatcagcgggaagacaacaaagaaccccagcacgaccagcatattatcgatgagcaggaaatatttacccaggttcctcgcctgcgatacgcgggacatttcccctcccgggaaataaaagatgagcactttctattctgcattgccgctaagacttttcccatcacttcggggacaatatttttttatcaaaacgtcgctttgatagagagtttttatcaaatatgtgaataatgcagaaaatggcattttggacttttcacagggtctggttgcgcaggtatagtaatacttacagcgtattaaagacgttacgggaaggagtaggtatagaatgtttggctatcgcagtaacgtgccaaaagtgcgcttaaccacagaccgactggtcgtgcgtctggtgcatgatcgtgatgcctggcgtcttgcggattattacgcagagaatcgccatttcctcaagccctgggagccagtgcgcgacgaaagccactgttatccatcaggctggcaggccaggctggggatgattaacgaatttcataaacaaggttcagctttctactttggcttattcgacccggacgaaaaagagattattggcgttgccaatttttccaatgttgttcgtggctcttttcatgcctgctatctcggttattcgattgggcaaaaatggcagggcaaaggactcatgtttgaagccctgaccgcagccattcgttatatgcagcgcacccaacatattcatcgcattatggctaattatatgccgcacaataaacgcagcggtgatttactggcgcgactgggttttgaaaaagaaggctatgcgaaagactatctgttgattgatggacaatggcgcgatcacgtactgacggcattaactaccccagactggacgcccggccgctaaggagaatctcatgaaatatcaacttactgcccttgaagctcgcgtgattggttgcttgctggaaaagcaggtgaccacgccggagcaatacccgctctcagtcaatggtgtagtcacggcctgtaatcagaaaacgaaccgtgaaccggtcatgaatctgagtgaatctgaagtgcaggagcaactggataatctggtcaaacgccattatctgcgcacggtgagtggctttggtaatcgggtcaccaaatatgaacaacgtttttgtaattcagaatttggcgatctgaaactgagcgcagcggaagtggcgttaatcaccacgttgttattgcgtggtgcccagacgccgggtgaactgcgcagccgcgccgcgcgaatgtatgaattcagcgatatggcggaagtggagtcgacgctggaacaactggcaaatcgcgaagatggtccttttgtggtgcgtctggcccgcgaaccgggtaaacgcgaaagccgctacatgcatcttttcagtggtgaggtagaggatcagccggcggtaacggatatgtcgaacgcggttgatggtgatttacaggcccgcgtcgaagccctggaaatcgaagtggcagaactgaaacagcgtcttgattcgttgctggcccatctgggagattaaagtgaaaaaattacgtatcggcgttgtgggattaggcggcattgcgcaaaaagcgtggttaccggtgctggcggcagcgtctgactggatgttacaaggagcctggtcgcctacgcgcgcgaaagccctgccaatttgtgaaagctggcgcattccttatgccgattcgttatccagccttgccgccagttgcgatgcggtttttgtgcattccagcaccgccagccactttgacgtggtcagtacgttactcaatgcgggtgtacatgtctgtgtcgataaaccgctggcagaaaatctgcgcgatgctgaacggctggtggaactggcggcgcggaaaaaactgacgttgatggtcggttttaaccgtcgtttcgcaccactctacggtgagttaaaaacgcaactcgctaccgcagcttcgctaagaatggataaacatcgtagcaatagtgtcgggccacacgatctttatttcacgttgctggatgattatctgcatgtggtggataccgcgctgtggttgtcgggcggcaaagcctctctggatggcggtacgctactgactaacgacgctggcgaaatgctgtttgccgagcaccatttttcggccgatcctttgcagatcaccacctgtatgcatcgccgtgccggaagtcagcgtgaaaccgtgcaggccgtgactgacggtgcgctcatcgacattacggatatgcgcgaatggcgtgaggagcgcgggcagggcgtagtgcataaaccgattcctggttggcagagcactcttgagcaacgtggatttgtcggctgtgcgcggcacttcattgaatgtgtgcaaaatcagacagttctgcaaaccgccggcgaacaggcagtgctggcgcaacgtatcgttgacaagatctggcgcgatgcgatgagtgaataaaccctgtaacatctggcggtagcaattcaccataatccaggtagactattcgcctctttcagcgcctgccttgcaggcgttttgcccgtgggtctggattagaacaccgatgaatttattaaaatcgctggccgccgtcagctcgatgaccatgttttcgcgtgtgcttggcttcgcacgagacgcaattgtcgccagaatctttggcgcagggatggcaaccgacgcctttttcgtcgcttttaaacttcctaacttgttacgccgtatctttgccgaaggggcattttcccaggcatttgtaccgattctggcggaatataaaagtaagcagggtgaagacgccacgcgggtctttgtctcttatgtttctggcctgctgacacttgcgctggcggttgtgacggtcgctggcatgctcgccgcaccgtgggtgatcatggtgaccgcgccaggcttcgctgacacagctgacaaatttgccctgaccagccagctactaaagattacctttccctatatcttgctgatctccctggcgtcgctggtgggagcgattctgaatacgtggaaccgcttctcgattccggcgtttgcgccaacactgcttaacatcagcatgattggtttcgcgctgtttgccgcaccgtactttaacccaccggtgctggcgctggcgtgggctgttacggtcggcggcatcctgcagctggtgtatcagctaccgcacctgaagaagatcggcatgctggtcctgccgcgcattaacttccacgatgccggagcaatgcgcgtggtgaaacagatgggaccggcgatccttggcgtctctgtgagccagatctccttaatcatcaacaccatttttgcctcgtttcttgcttccggttcggtgtcttggatgtattacgccgaccgcttaatggagtttccctccggtgtgctgggcgtggcgcttggcaccattttgctgccgtcgctgtcgaaaagttttgccagtggcaatcatgatgaatacaaccgtttgatggactgggggttgcgtctttgtttcctgttggcgctgccgagtgcggttgcgttgggcattctttcgggtccgttaaccgtttcgctgttccagtacggtaaatttaccgcgtttgatgcgctgatgacccagcgggcgttaattgcctactcggtgggtttgattggcctgattgtagtgaaagtgttggctcctggcttttattcccgccaggacattaaaacgccagtgaaaattgccatcgttacgctgattttaacgcaattgatgaacctggcgtttattggtccgttgaaacatgccgggctgtcactttctattggtctggcggcgtgtctgaatgcttcgctgctttactggcagttgcgtaagcagaaaatctttactccgcaacccggctggatggcgtttctgttgcgtctggtggtggcggtactggtgatgtctggcgtgcttttaggtatgttacatatcatgccggagtggtcattgggtaccatgccctggcgcttactgcgtttaatggcggtcgtgctggcggggattgccgcgtacttcgctgcactggcggtactgggcttcaaagttaaagaatttgcccgccggacggtgtaacaatgcattccggcctgcagtgcaggccggagataatattcagatcgaaatctttttaccgccgcgatgggttgttgaggtctgaccgttcgccccatatagcgtcggttcctgatgcggtttcaacatttccagcgcctgttgattgcgctcaatctgtccttccagtaaccagccgttatgttgattcatttggcgtagttgctgcgttttcacagtaatttcctgccagcgttgactaatatcaacgctatttgctgtattgggttctttcctgcgtaactgttcgaggtaatccagcgtcgccagcagtgagcttttttgttctgtaatccattgcaactggctgccgttgatctgccccatagagagatgttgctgttcttgatccattaccgttttgagatcgttaagcacagcggacatctggtcgaggatctctgcaagacgtgtcatacgatcagttactctgcaagtcttgctgcgcttcgttgatcagcgcatcggcaattttgccggtgtccatttttagttcaccgttacgaatcgccagttttaacgcttcgacacgttcaagattgatatcactgctgccgggttgcatcagttttgcttgcgcgtcgcttaacgtcacactggtgctggtggaggctgttgtttttgccgcccgggtgttcgttaccgacgcgtcagtggtttcgcgtggttgaacggtgcttacgggcttcagaggcgaagtgcgatcaatactcatggtttattcctcattgagggcgcttttatcatgtgttgcttatttatcggcaagggacgggtaatctttaacagcttactggtttataagaatattcccatctgcatcaacaacgccgctgaccaccagtcccgataccatgcgcacccgcgcattctgtgtgacggctgcattgttcagcgcctgaccttctgcgttggcgctaaacccgttaccgctggcgatcacgttgacgcgttgtcccgcttttacccgccatgcctggcgaaactgggttaactggataggttgatcgggtgatagatcgcgcaggctaacggcatcaacaagttgattgatatccagcaccgtacgcggtggcagggtatcctgccgtccgcgttttagtttgacattgccagcttccagctttcctccccgcacaatgggcatcgcggcaaccacataatttcctgtggcctgtacattaacctgtaaatatcgtttgtcgttaccgcagcgtgccaacacattcacattgccccacaggcgggaattattgctcatcgaaagcaatggctgctcgcacggcggtagtagattgggcgctgtacgaatagaaacacgaacctcatcacttacccccgcgagctgggcgctaaaaaaggtttgcaattgcgatgtgagattactcgccgcacttaacggagtgaatagtatcgagatgatcgccacgctacgttttattgccagcattttcgcccccagccatttctacaacgtgaattgtacctgtccgcaatggtcatcaacggcataaatagcgacccattttgcgtttattccgccgataacgcgcgcgtaaaggcatttaagctgatggcagaattttgatacctgcggaggagatatgctcgataagctcgacgccgccttacgttttcaacaagaggcgctcaatctgcgcgcccagcgtcaggaagtgctggcagcaaacatcgccaatgccgatacccctggttatcaggcgcgcgatatcgattttgccagtgaacttaaaaaagtcatgcaacgtggacgggatgcaaccagtgtggttgcactgacgatgacctcaacgcaacacattccggcgcaggcgctgacgcctcctaccgcagaactgcaataccgtattccggaccagccttcgcttgacggtaataccgtcgatatggatcgcgaacgcacccagtttgccgataacagcctgcaataccagatgagccttagcgcgttgagcgggcaaatcaaaggcatgatgaacgttttacagagcggaaattaacggatggcactgctgaatatttttgatatcgccgggtcggcgttaactgcccagtcccagcgcttgaacgtggcggccagtaatctggcgaatgctgatagcgtgaccggtcccgatggacagccatatcgggcaaaacaggtggtattccaggttaacgctgcaccaggtgctgcgacaggcggcgtaaaggttgccgatgttatagaaagtcaggccccggacaaactggtttatgaaccgggtaatccgctggcggatgcaaagggctacgtaaaaatgccgaacgttgatgtcgtcggggagatggttaacaccatgtcggcgtcacgcagctatcaggccaatgttgaagtgctcaacatggtgaaaagcatgatgctgaaaacccttacgctcggtcaataaaggagaaagctatgtccattgcggtaaccaccaccgatccgacaaataccggcgtcagtaccaccagcagtagttcgctcacgggcagcaacgccgcagacttacaaagcagttttctgactttgttggtggcgcagctgaaaaaccaggacccgaccaatccaatggaaaacaacgagctgacgtcgcaattggcacaaatcagcacggtcagcgggattgaaaaactcaataccacgctcggatctatttccggacagattgataacagccagtcgttacaggccagtaacctgatcggtcacggcgtgatgatccccggcaccactgttcttgcgggaaccggcagtgaagaaggggctgtgaccacgaccacgccgtttggtgttgagctgcaacaggcggcagacaaagttacggccaccatcaccgataaaaatggcgcggttgtgcgcaccattgatattggtgaactgaccgccggagtccacagtttcacctgggacggtacgttgactgatggcagcactgcgccgaacggttcttacaatgtagcgattagcgccagtaacggtggtacacaactggttgcccagccgctgcagtttgctctggtgcagggtgtgatccgcggcaacagcggtaatacgctggatctcggcacttacggcaccaccaccctcgacgaagtacggcagataatttaagccttcacatttcaggagtcagtcatggccttttctcaagcggttagcggattaaacgctgccgccaccaacctcgatgttattggcaacaatatcgccaactccgccacctacggctttaaatcaggcacggcctcttttgccgatatgtttgccggttcgaaagtgggactgggggtaaaagttgccggtatcactcaggactttaccgatggcacgaccaccaacaccgggcgaggtctggacgttgctatcagccagaacggttttttccgtctggtagacagcaacggttcggtgttctacagccgtaacggacaatttaagctggatgaaaaccgtaacctggtgaatatgcaaggtttacagctgacgggttacccggcaaccggtacgccgccgactattcagcaaggggcgaatccgaccaatatttcgatcccgaataccctgatggcagcgaaaactaccaccacggcgtcgatgcagatcaacctgaattccagtgatccgcttcctactgttacgccattcagcgccagcaatgcggatagctataacaaaaaaggttcggtgactgttttcgacagtcagggtaatgctcatgacatgagcgtctactttgtgaagaccggggataataactggcaggtctacacccaggatagcagtgatccaacaggtacagccgagcctgcaatgaagctggtgtttaatgccaatggcgttctgacctcaaatccaacagagaatattaccactggcgcaattaacggcgcagatcccgccacgtttagcctgagcttcctcaactccatgcagcaaaataccggcgctaacaatattgtggcaaccacccagaatggctacaaaccgggcgatctggtgagttatcaaatcaatgatgacggtacggttgtcggcaactattccaacgaacaaacacaactgctggggcagattgtactggcgaactttgccaacaacgaaggtctggcatccgaaggcgacaacgtctggtctgcgacgcaatcttctggcgtggcgctgttggggacagccgggacgggcaactttggcaccctgaccaacggtgcgttggaagcgtccaatgtcgatctcagtaaagaactggtcaatatgatcgttgcccagcgtaactatcagtctaacgcccagaccatcaaaactcaggaccagatcctcaacacgctggttaacttacgctaatcgctgacgggatagctcaatggatcacgcaatttataccgcgatgggagcagccagccagacactgaatcaacaggcggtaaccgccagtaatctggccaatgcctcaacgcccggttttcgcgcgcagttgaatgctttacgcgcggtgccagtggaagggctttctctgcccacgcgcacgttggtcacggcgtcaacgccgggcgcagatatgacgcccggcaaaatggattacacctcgcgcccgctggacgtcgcgttgcagcaggatggctggccgtgcagaccgctgacggcagcgaagggtatacgcgtaatggcagcattcaggttgatcccaccgggcaactgacaattcaggggcatcaggtgataggcgaggcggggccaattgctgtgccggaaggagcggaaatcactattgctgccgatggcacaatctcggcgctcaatccgggcgatccggcaaatacagttgcgccagtagggcgtctgaaactggtgaaagccacgggcagcgaagtgcagcgcggtgacgacggcatttttcgtttaagcgcagaaacccaggccacgcgagggccggtactgcaggcagatccaaccttgcgtgtgatgtcgggggttctggaaggcagtaacgtcaatgccgttgcggcaatgagcgacatgattgccagcgcgcggcgttttgaaatgcagatgaaggtgatcagcagcgtcgatgataacgcaggccgtgccaaccaactgctgtcgatgagttaattgaaaggatacatgacaagtataagttgcccgatgcgcaagtttatcgggtctatgggggcaatcgcaatttatcgattttgcgagcacttgtaggccggataaggcgtttacgccgcatccggcaagaagacatatgcactttgtcactaatccactacaggacattttatgatcagttcattatggatcgccaaaacgggccttgacgcccagcaaaccaatatggacgtcattgccaacaacctggcaaacgtcagtactaacggttttaagcgtcagcgcgcggtgtttgaagatctgctttatcaaaccattcgccagccgggggcacagtcttccgaacaaaccaccttaccctccggattacaaatcggcacgggggtacgcccggtcgccactgaacgcttacacagccagggaaacctgtcgcagaccaacaacagcaaagatgtcgcgattaaagggcagggctttttccaggtgatgttgccagatggttcatcagcctatacccgtgacggctctttccaggtggatcagaacgggcagctggtggttttcaggtgcagccagcgatcaccattccggcgaatgcgttaagtatcaccatcggtcgtgatggcgtggtcagcgtaacccaacaaggccaggcagctccggttcaggttgggcagctcaatctcaccacctttatgaatgacaccgggctggagagcattggcgaaaacctctacaccgaaacgcaatcctctggtgtaccgaacgaaagcacgccgggcctgaacggcgcgggactgctgtatcaagggtatgttgaaacgtctaacgtcaacgtggcggaagaactggtcaatatgattcaggtgcaacgcgcttacgaaatcaacagtaaagcggtgtccaccaccgatcagatgctgcaaaaactgacgcaactctaaggcttaaccggtggcaggttcaccggtttactgatttttgaagatgatagccatgcaaaaaaacgctgcgcatacttatgccatttccagcttgttggtgctttcactaaccggctgcgcctggataccctccacgccgctggtgcagggggcgaccagtgcacaaccggttcccggtccgacgcccgtcgccaacggttctattttccagtctgctcagccgattaactatggctatcaaccgctgtttgaagatcgtcgaccacgcaatattggcgatacgctgaccatcgtgttgcaggagaacgtcagcgccagcaaaagctcctctgcgaatgccagccgtgacggtaaaactaattttggctttgatactgtgccgcgctatttgcaggggctgtttggtaacgctcgtgccgatgtcgaagcctccggtggtaacacgttcaacggaaagggcggggccaatgccagcaatacctttagcggcacgttgacggtgacggttgaccaggtactggtcaacggcaacctgcatgtggtgggtgaaaaacagattgccattaatcagggtaccgaatttattcgcttctctggcgtggttaatccacgcactatcagcggcagcaataccgtaccgtctactcaggtggcggatgcgcgcattgaatacgtaggcaatggctacattaacgaagcgcaaaatatgggctggttgcagcgtttcttccttaacctgtcgccaatgtaagtgaggctgtggtgattaaatttctctctgcattaattcttctactggttacgacggcggctcaggctgagcgtattcgcgatctcaccagtgttcagggggtaaggcaaaactcactgattggctatggtctggtggtggggctggatggcaccggtgaccagacaacccagacgccgtttaccacacaaacgcttaataacatgctctcacagctgggaattaccgttccgacgggcaccaatatgcagctaaaaaacgtcgctgcggtaatggtgacagagtcacttcctccgtttggacgtcaggggcaaaccatcgatgtggtggtttcttccatgggaaatgccaaaagcttgcgtggaggtacgttgttgatgacgccgcttaagggcgttgacagtcaggtgtatgcgctggcgcagggcaatattctggttggcggcgcaggagcctccgctggcggtagcagtgttcaggtgaaccaactgaacggtggacggatcaccaatggtgcggttattgaacgtgaattgcccagccagtttggcgtcgggaatacccttaatttgcaacttaacgacgaagatttcagcatggcgcagcaaatcgctgacaccatcaaccgcgtgcgtggatatggcagcgccaccgcgttagatgcgcggactattcaggtgcgcgtaccaagtggcaacagttcccaggtccgtttccttgcagatatccagaatatgcaggttaatgtcaccccgcaggacgctaaagtagtgattaactcgcgcaccggttcggtggtgatgaatcgcgaagtgaccctcgacagctgcgcggtagcgcagggaaatctctcagtaacagtcaatcgtcaggccaatgtcagccagccagatacaccgtttggtggtggacagactgtggttactccacaaacgcagatcgatttacgccagagcggcggttcgctgcaaagcgtacgttccagcgccagcctcaataacgtggtgcgcgcgctcaatgcgctgggcgctacgccgatggatctgatgtccatactgcaatcaatgcaaagtgcgggatgtctgcgggcaaaactggaaatcatctgatgatcagcgacagcaaactactggcaagtgcggcctgggatgcgcaatcactcaacgaactaaaggcgaaagcgggcgaagatccggcggcaaatatccgtccggtggcccgtcaggtggaagggatgttcgtgcagatgatgttgaaaagcatgcgcgacgctttaccaaaagatggcctgttcagcagcgagcacactcgcctgtataccagtatgtatgaccagcagattgcccaacagatgacggcgggcaaaggtctggggcttgcagagatgatggttaaacagatgacgccagaacaaccattgccagaggagtccacgccagcagcaccgatgaaattcccgctcgaaactgtggtgcgttatcaaaatcaggcgctttcgcagctggtgcaaaaggccgtgccacgtaactacgatgattcgctgccgggtgacagtaaagcattcctcgcgcaactctcgctgcccgcccaactggcaagccagcaaagcggtgtgccacatcatttgatcctcgctcaggcggcgctggagtctggttgggggcaacggcaaatccgccgcgaaaacggcgagccgagctataacctgtttggcgtcaaagcctctggcaactggaaaggtccagttactgaaatcaccacgactgaatatgaaaatggcgaagcgaagaaagtaaaagcgaaatttcgggtctacagctcgtatctggaagcattgtcggattacgttgggctgttaacacgtaacccgcgctacgccgccgtgacgacagccgcgagtgcggagcagggggcgcaggccctacaggacgcggggtatgctaccgatcctcactatgcccgtaaactcaccaacatgatccagcagatgaaatcgataagcgacaaggtgagcaaaacctacagcatgaacattgataatctgttctgaataactcaagtccggcgggtcgctgccgataatactctgtaattgaaggcttataaggaacctccatgtccagcttgatcaataacgccatgagcggactgaacgcggcccaggcggcgttaaatacggcaagtaataatatctccagctataacgttgccggatatacccgccaaaccactattatggcgcaggccaatagcacgttgggcgctggcggctgggttggcaatggcgtctacgtttctggtgtgcagcgtgagtatgatgcgtttattaccaaccagttacgtgctgcgcagacgcaaagtagcggcctgaccgcccgctatgagcagatgtcgaaaatcgacaatatgctctccaccagtacctcttcgctggcaacacagatgcaggatttcttcaccagcctgcaaacgctggtgagtaacgcggaagacccggcagcgcgccaggcgctgattgggaaatcagaagggttggtgaatcagtttaaaaccaccgatcaatatctgcgcgaccaggacaaacaggtcaatatcgcgataggtgccagcgttgatcagatcaacaattacgctaaacaaattgccagcctgaacgatcaaatctcgcgcctgacaggcgtgggggcaggggcgtcacctaacaatctgctggatcaacgcgatcaactggtgagcgaattaaaccagattgttggtgtagaagtcagcgttcaggatggcggcacttataacatcacggtggccaatggttactcactggttcagggaagtacggcgcggcaactggcggcagttccttccagcgctgacccttctcgtacgactgtcgcttatgttgatgggacggcaggcaatattgagatcccggagaaattactgaataccgggtcgctgggcggcattctgacattccgttctcaggagctggaccagacgcgtaatacgcttggacaactggcgctggcatttgccgaggctttcaacacccaacacaaagccggatttgatgctaacggcgatgctggtgaagatttctttactatcggtaagcccgcggttctgcaaaacacgaaaaacaaaggtgacgttgcgatcggtgccacggtaactgatgcctccgtggtactggcgacagattacaaaatctcgttcgataataatcagtggcaggtcacccgccttgccagcaataccacttttacggtgacgccggatgccaacggtaaagtggcatttgatggtctggagttgacgtttacaggaacgcctgccgttaacgacagcttcacgctgaaaccagtaagtgacgccatcgtcaacatggatgtattaatcaccgacgaagcgaaaatagcgatggcgagcgaaaaagatgcgggtgatagcgataaccgcaacggtcaggccctgctggatctgcaaagcaacagtaaaacggtgggcggtgcgaaatcctttaacgacgcttatgcctcgttagtgagtgatatcggtaataaaaccgcgacgttgaaaaccagtagcaccacgcaaggtaatgtggtgacgcagctttccaatcagcagcagtcgatttccggtgtcaatctcgatgaggagtacggaaatctgcaacgttttcagcagtattacctggcgaatgcgcaggttctgcagacggcaaacgcgatttttgatgcgctgattaacattcgctaaggggagataaaatgcgtttcagtacccagatgatgtaccagcaaaacatgcgtggtatcaccaattctcaggcagaatggatgaagtacggcgaacagatgtcgacgggtaagcgagtcgttaacccttcagatgatcccattgctgcatcacaagcggttgttctctcccaggcacaggcgcaaaacagccagtacacgctggcgcgtactttcgccactcaaaaagtgtcactggaagagagtgtacttagccaggtcaccactgctatccagaatgctcaggaaaaaattgtctacgccagcaatggcaccttgagtgacgatgaccgggcctcgctggctacggatattcaggggcttcgtgaccagttgctgaatctggcgaacaccactgacggtaatgggcgctacatttttgccggttataaaacagagactgcgccgtttagtgaggctaacggtgattatgtcggcggaacagaaagtattaagcaacaggtcgatgcttcgcgttcgatggtgataggacatacgggcgacaaaattttcgacagtattaccagtaacgcggtagcggaaccagacggtagcgcttctgaaaccaatctttttgccatgctggatagcgccatcgcagccctgaaaacgccggtcgcggatagcgaagcggataaagaaaccgccgctgcggcgttagataaaaccaaccgcggactgaaaaactcgctgaacaatgtgctgaccgttcgcgcggaattaggcacgcagctgaacgaactggagtcgctggattcattaggtagcgatcgcgctttagggcaaacgcagcagatgagcgatctggttgatgtggactggaatgcaactatttcatcttacatcatgcagcaaacggcattgcaggcatcgtataaagcatttaccgatatgcagggattgtcgctcttccagctcaacaaataatttcgctttaaaacatatcatgaaactgggtatgttttgtctgcctgctctgggatcgccggggcgggcatttttttgcctattttgcattgttggttagcaaggatgccattcgatgaattttaatatgttgattcaaagatgaaataaaaaagccctggcagttaccagggcttgattacttgagctaattattactcaacaggttgcggacgcgcaggagcggcagaggcatgatgtgttgccgtatgaccacctgcggcacctttaccttcgaaggcaaaagtagggcgctgccagtcactgtgacgcggtgcatccggaacatattccggtgccggagcgcgcgtcatcggcaccgtagcgtggttatgctcaacggtgacctcaggttcaaccgcagctaccgtttcaacttctgctgcgacttcagcgacgactggcgcggcaggttgagcaacaacttcaggttcagcaaccacaacctcagcagtttcggcaacttcttcaatatctgccgtctcttcctgcggttcaaccaccggttctgcgtgttctgcaacttcctgggctacggcaacatcagactcggtaatcacctgcggctgttcagttactgcggcggcaatcacttcaggatgcgtcgtttcaaccacttccggttgcggttcggcaatctgaacgggggcttctacaacttcagccacttcttcaacaaccggtgcgctaacaacaggttcgacagcggcggcgacagggaccccagtcaccatcggctgcacttgtacttcttcctgttcgcgctgctcttcaacttgtacatcttgcggacgtacaattggatagcggatccagactttgccagaggccagttccggagacgcgcacgctacggtcaacggcattggcgactgggttggataacgctcgtcacgatagcgacgacgacgctgaccactcacgcgcaggtgacgaggcgagcggcgagaacgacgcggcatgccaccgttgtcacggttatcagcattgttctcttcttgctgttctggtgcagtttgcgctacgactggcagcgggactttcaccagttctgtgcgtggagctggagcttcctgaacaattggttcggcagcggcagtttcttcaaccaccggtgcgactaccgcttcttcggctacgctttgctcgtaacgcactttctgattgagctgacgctgtttacgacgcggctgaaccggacgtacacgttcttcctgttcggtttcctgaacagattgctcttcaacattcagcgccttcgcttcttgttgcgcctgacgtttatcatcgttacggcggcggctacgttcacgacgcggcgcttgctgctcgtcggtggtacgtgctttttccgttacctcagcctgctgacggctctcacgcgtctcggcagtctgctgctgtgcctggcgacgattacgacggttttcttcgcgattatcgctgccttcagtacgttcactacgggtgtcgcggcgctcattacggtcacggcggttgctctgacgaggtttgcgacgatcctgttgacgttccggtttcgcttctgctttcggtgttggttgctcggtcggtttggcttcttcaccaccgctgaacagcgctttcagtgcgccgaagaagcggcttaacagcccaggttgtgcaggagctgctggtgttgccgttgcagctttcggtgctggggctacgacagtcgcggcaggttcagctggggttggcgctggcggcacatccggcatggcaaaggttgccagtgcaggttgttcaggacgcttacgttcagcgaactcttcttcagacggcagcgccatcgcttcttcatgcagcttcggcagcatgtagcttaaggtcggcgtttcttcccctttgcgcacgcgcaacacgtggtagtgcggggtttccatctgatcgtttggcacaatcacgcagcgaacaccgtcctgacgcgtttcaatcgcattcaccgcagaacgtttttcattcagcagataagaagcgattggcacaggaacaatggcgtgaacttcctgggtgttctctttcagcgcttcttcttcgatcaaacgcagaatagagagcgacagcgattcgttgtcacgcacggtaccggtaccggagcagcgcgggcagacgtgatggctggattcacccagtgatgggctcaggcgctggcgggacatttccagcaggccaaagcgagaaatatggctgatttgaatacgcgcacggtcctgacgcaccgcttcacgcagacggttttctaccgcacgctggtggcgtacaggcgtcatgtcgatgaagtcgataacaatcaggccgccgaggtcacgcaggcgcagctgacgagcaatctcatcggcagcttcgaggttggtgttaaacgcggtttcttcgatatcgccgccgcgggtcgcgcgtgcggagttgatgtcgatggccgttaacgcttcggtgctgtcgataacaatcgaaccaccggacggcagacggacttcacgctggaaggcggactcgatctgcgactcaatctggtagtggctgaacagcgggatctcgccggtatacagtttgattttgctgctgaaatccgggcgacctaatgcagcgatatgctgacgtgccagttcgagcactttcgggttatcgataaggatttcgccgatgtcctgacgtaagtaatcgcggaatgcgcgaacgattacgttgctctcctgatgaatcaggaacggagccgggcggctttcagcggcttttttgatggcttcccagtgtttcaggcggaagcttaaatcccattgcagcgcctcagcagatttgcctacgccagcggtgcgcacgataagccccatgccttccggcagttcaaggcttgccagtgcttcttttaattcggtacggtcatcgccttcgatacggcgagaaatgccacctgcgcgcgggttatttggcatcagaaccagatagctacccgccagactgataaaggtggttaatgccgcgcctttgttgccgcgctcttctttatcgatctgaacaatgacttcctgaccttcacgcaacacatctttaatgttgggacgaccatgagcactgtagttagcagggaaatattcgcgggcaatttcttttagtgggaggaaaccgtgacgttcagcgccgtaatcaacaaaagcagcttccagactcggttcaatgcgggtgattttacctttgtagatgtttgcctttttctgctcgtgccctggactttcgatatccaggtcataaagacgctgcccatctacaagggcaacgcgcaactcttcctgctgagttgcgttgattaacattcttttcatcgtaacttactcattattcttacattgacgactaagctgcgggcaaagtaacgcctttccgggtgtgaaccgatggcctcgtgtctagtcgcgtcgccaacctcacggttatcgtcagctcaaagaggcgcagagtgtcggttgcccgtttttcatgcggaaaaacagcgcaattatcaaagaaacagactgggtattactctccagaaatatttccatctaccggtaaggactgcaacccgcagcccgctaactgcctgaaagatcaatacgtcttacgccattgctgcgtggatgatcggtcgggcaaaatgggttattccgtaaaatttcttgttttaacaaggatggacacggaaacggcctcattattccactgcaagccttgttatagcaagatgacttttaccatttatcacccgcttactcacagttttttcacttcttgctggtgattggtttaataaccatcaataaagtgatcacgtagtgaagtaataaggtgcaaaactaaatataagcatagaaaaatgagtggcgcgaatcctgttggctaattagaatcgcccaccatgaaaacagagactccatccgtaaaaattgttgctatcaccgctgacgaagcggggcaacgtatcgataactttttgcgtacccaattgaaaggcgtaccaaaaagtatgatttaccgtattttgcgtaaaggcgaagtgcgggtgaacaaaaaacgtattaagcctgaatataaactcgaagcgggtgatgaggtgcgtatcccaccggttcgcgttgctgagcgggaagaagaggcggtttcgccacatctgcaaaaggtggcggcgctggcggacgtcatcttatatgaagatgatcatatcctggtgctgaataaaccttccggtacggcggtacatggcggcagtggtttaagcttcggcgttatcgaaggtttgcgggcgttgcgcccggaagcgcggttccttgaactggttcatcgtctcgaccgggacacttcaggtgtgttgctgatagcgaaaaaacgctcggcgttgcgttctctgcatgagcaattacgtgaaaaaggaatgcaaaaagattacctggcgctggtgcgcggtcagtggcagtcgcatgtgaagagcgttcaagcgccgttattgaaaaatattctgcaaagcggcgaacgtatcgtgcgtgtcagtcaggaaggcaaaccgtcggaaacacgctttaaagtggaagaacgctatgcatttgccaccctggtgcgttgtagcccggtaaccggacgtactcatcagatccgtgtgcatacacagtatgcgggtcatccgattgcctttgacgatcgctacggtgaccgtgaatttgacagacagctcactgaagcaggcacgggattaaatcgtctgttcctgcacgccgcagcgttgaagtttacccatccggggaccggtgaggtgatgcgtatcgaagcgccgatggatgaaggtttgaagcgttgtttgcaaaagctgcgtaacgcgcgctaatacaagcatataagcctgataatgggcggttggcctgataaggcgtttacgccgcatcaggccgcctgcaccgattgccggatgcgacgtaaccgcatccagcgcaaacaactatcccatcagcgggtttttcccttcccgacgtaacatctgacacagcgcgattagcggtaaaccaaccagcgtgttagggtcacgtccctctaaacgctcaaacagcgtaatgccaaatccttcactcttaaagctacccgcgcagtgcaggggatgctccttacgcacgtaattatcaatctccgcctcgctcaggtgacggaaatggacgtcaaaaggctccacttctgtttgtagatgcccattcgccgaattaaacaacgccagtccagtatagaaggtgacgatattgccgctggctttgcgtaattgcagacaggcattttcttccgttaacggtttaccggtgatttcgccatcaagaacacatacctggtctgaaccaataattaaatgatccggataacgtgacgccagagattgcgctttttcttgtgccagtcgaagcaccaactgtcgcggtgattcgtcgctgcgtggggtttcgtcgacctctggtgctgcacattcaaaagagatttgcagtttttccagaagagcgcgacgccatggcgaggtggaggctaaaataagtttaggcatatttttttccatcagatatagcgtattgatgatagccattttaaactatgcgcttcgttttgcaggttgatgttcgttatcagcactgaacgaaaataaagcagtaacccgcaatgtgtgcgaattattggcaaaaggcaaccacaggctgcctttttctttgactctatgacgttacaaagttaatatgcgcgccctatgcaaaaggtaaaattacccctgactctcgatccggttcgtacggctcaaaaacgccttgattaccagggtatctatacccctgatcaggttgagcgcgtcgccgaatccgtagtcagtgtggacagtgatgtggaatgctccatgtcgttcgctatcgataaccaacgtctcgcagtgttaaacggcgatgcgaaggtgacggtaacgctcgagtgtcagcgttgcgggaagccgtttactcatcaggtctacacaacgtattgttttagtcctgtgcgttcagacgaacaggctgaagcactgccggaagcgtatgaaccgattgaggttaacgaattcggtgaaatcgatctgcttgcaatggttgaagatgaaatcatcctcgccttgccggtagttccggtgcatgattctgaacactgtgaagtgtccgaagcggacatggtctttggtgaactgcctgaagaagtgcaaaagccaaacccatttgccgtattagccagcttaaagcgtaagtaattggtgctccccgttggatcggggataaaccgtaattgaggagtaaggtccatggccgtacaacagaataaaccaacccgttccaaacgtggcatgcgtcgttcccatgacgcgctgaccgcagtcaccagcctgtctgtagacaaaacttctggtgaaaaacacctgcgtcaccacatcactgccgacggttactaccgcggccgcaaggtcatcgctaagtaatcacgcgtctgcgtgatgaagcttagtgaggattttccccaggcaactggggaaagaccaaaccgggcggcgacgataccttgacacgtctaaccctggcgttagatgtcatgggaggggattttggcccttccgtgacagtgcctgcagcattgcaggcactgaattctaattcgcaactcactcttcttttagtcggcaatcccgacgccatcacgccattacttgctaaagctgactttgaacaacgttcgcgtctgcagattattcctgcgcagtcagttatcgccagtgatgcccggccttcgcaagctatccgcgccagtcgtgggagttcaatgcgcgtggccctggagctggtgaaagaaggtcgagcgcaagcctgtgtcagtgccggtaataccggggcactgatggggctggcaaaattattactcaagcccctggaggggattgagcgtccggcgctggtgacggtattaccacatcagcaaaagggcaaaacggtggtccttgacttaggggccaacgtcgattgtgacagtacaatgttggtgcaatttgccattatgggctcagttctggctgaagaggtggtggaaattcccaatcctcgcgtggcgttgctcaatattggtgaagaagaagtaaagggtctcgacagtattcgggatgcctcagcggtgcttaaaacaatcccttctatcaattatatcggctatcttgaagccaatgagttgttaactggcaagacagatgtgctggtttgtgacggctttacaggaaatgtcacattaaagacgatggaaggtgttgtcaggatgttcctttctctgctgaaatctcagggtgaagggaaaaaacggtcgtggtggctactgttattaaagcgttggctacaaaagagcctgacgaggcgattcagtcacctcaaccccgaccagtataacggcgcctgtctgttaggattgcgcggcacggtgataaaaagtcatggtgcagccaatcagcgagcttttgcggtcgcgattgaacaggcagtgcaggcggtgcagcgacaagttcctcagcgaattgccgctcgcctggaatctgtatacccagctggttttgagctgctggacggtggcaaaagcggaactctgcggtagcaggacgctgccagcgaactcgcagtttgcaagtgacggtatataaccgaaaagtgactgagcgtacatgtatacgaagattattggtactggcagctatctgcccgaacaagtgcggacaaacgccgatttggaaaaaatggtggacacctctgacgagtggattgtcactcgtaccggtatccgcgaacgccacattgccgcgccaaacgaaaccgtttcaaccatgggctttgaagcggcgacacgcgcaattgagatggcgggcattgagaaagaccagattggcctgatcgttgtggcaacgacttctgctacgcacgctttcccgagcgcagcttgtcagattcaaagcatgctgggcattaaaggttgcccggcatttgacgttgcagcagcctgcgcaggtttcacctatgcattaagcgtagccgatcaatacgtgaaatctggggcggtgaagtatgctctggtcgtcggttccgatgtactggcgcgcacctgcgatccaaccgatcgtgggactattattatttttggcgatggcgcgggcgctgcggtgctggctgcctctgaagagccgggaatcatctccacccatctgcatgccgacggtagctatggtgagttgctgacgctgcctaatgctgaccgtgtgaatccagagaattcaattcatctgacgatggcgggcaacgaagtcttcaaggttgcggtaacggaactggcgcacatcgttgatgagacgctggcggcaaataatcttgaccgttctcaactggactggctggttccgcatcaggctaacctgcgtattatcagtgcaacggcgaaaaaactcggtatgtctatggacaatgtcgtggtgacgctggatcgccacggtaatacctctgcggcctctgtcccgtgcgcgctggatgaagctgtacgcgacgggcgcattaagccggggcagttggttctgcttgaagcctttggcggtggattcacctggggctccgcgctggttcgtttctaggataaggattaaaacatgacgcaatttgcatttgtgttccctggacagggttctcaaaccgttggaatgctggctgatatggcggcgagctatccaattgtcgaagaaacgtttgctgaagcttctgcggcgctgggctacgacctgtgggcgctgacccagcaggggccagctgaagaactgaataaaacctggcaaacccagccagcgctgttgactgcctctgttgcgctgtaccgcgtatggcagcagcagggcggtaaagcaccggcaatgatggccggtcacagcctgggggaatattccgcgctggtttgcgctggtgtgattgatttcgctgatgcggtgcgtctggttgagatgcgcggcaagctcatgcaagaagccgtaccggaaggtacgggcgctatggcggcaatcatcggtctggatgatgcgtctattgcgaaagcgtgtgaagaagctgcagcaggtcaggtcgtttctccggtaaactttaactctccgggacaggtggttattgccggtcataaagaagcggttgagcgtgctggcgctgcctgtaaagctgcgggcgcaaaacgtgctctgccgttaccagtgagcgtaccgtctcactgtgcgctgatgaaaccagcagccgacaaactggcagtagaattagcgaaaatcacctttaacgcaccaacagtttctgttgtgaataacgttgatgtgaaatgcgaaaccaatggtgatgccatccgtgacgcactggtacgtcagttgtataacccggttcagtggacgaagtctgttgagtacatggcagcgcaaggcgtagaacatctctatgaagtcggcccgggcaaggtgcttactggcctgacgaaacgcattgtcgacaccctgaccgcctcggcgctgaacgaaccttcagcgatggcagcggcgcttgagctttaaaagaggaaaatcatgaattttgaaggaaaaatcgcactggtaaccggtgcaagccgcggaattggccgcgcaattgctgaaacgctcgcagcccgtggcgcgaaagttattggcactgcgaccagtgaaaatggcgctcaggcgatcagcgattatttaggtgccaacggcaaaggtctgatgttgaatgtgaccgacccggcatctatcgaatctgttctggaaaaaattcgcgcagaatttggtgaagtggatatcctggtcaataatgccggtatcactcgtgataacctgttaatgcgaatgaaagatgaagagtggaacgatattatcgaaaccaacctttcatctgttttccgtctgtcaaaagcggtaatgcgcgctatgatgaaaaagcgtcatggtcgtattatcactatcggttctgtggttggtaccatgggaaatggcggtcaggccaactacgctgcggcgaaagcgggcttgatcggcttcagtaaatcactggcgcgcgaagttgcgtcacgcggtattactgtaaacgttgttgctccgggctttattgaaacggacatgacacgtgcgctgagcgatgaccagcgtgcgggtatcctggcgcaggttcctgcgggtcgcctcggcggcgcacaggaaatcgccaacgcggttgcattcctggcatccgacgaagcagcttacatcacgggtgaaactttgcatgtgaacggcgggatgtacatggtctgaccgcgatttgcacaaaatgctcatgttgcgcgcagtctgcgtggttatgagtaataattagtgcaaaatgatttgcgttattggggggtaaggcctcaaaataacgtaaaatcgtggtaagacctgccgggatttagttgcaaatttttcaacattttatacactacgaaaaccatcgcgaaagcgagttttgataggaaatttaagagtatgagcactatcgaagaacgcgttaagaaaattatcggcgaacagctgggcgttaagcaggaagaagttaccaacaatgcttctttcgttgaagacctgggcgcggattctcttgacaccgttgagctggtaatggctctggaagaagagtttgatactgagattccggacgaagaagctgagaaaatcaccaccgttcaggctgccattgattacatcaacggccaccaggcgtaagtgaacatctccaggcggtcgttcgaccgcctgagttttatctttttgtcccactagaatcattttttccctccctggaggacaaacgtgtctaagcgtcgtgtagttgtgaccggactgggcatgttgtctcctgtcggcaataccgtagagtctacctggaaagctctgcttgccggtcagagtggcatcagcctaatcgaccatttcgatactagcgcctatgcaacgaaatttgctggcttagtaaaggattttaactgtgaggacattatctcgcgcaaagaacagcgcaagatggatgccttcattcaatatggaattgtcgctggcgttcaggccatgcaggattctggccttgatataacggaagagaacgcaacccgcattggtgccgcaattggctccgggattggcggcctcggactgatcgaagaaaaccacacatctctgatgaacggtggtccacgtaagatcagcccattcttcgttccgtcaacgattgtgaacatggtggcaggtcatctgactatcatgtatggcctgcgtggcccaagcatctctatcgcgaccgcctgtacttccggcgtgcacaacattggccatgctgcgcgtattatcgcgtatggcgatgctgacgtgatggttgcaggtggcgcagagaaagccagtacgccgctgggtgttggtggttttggcgcggcacgtgcattatctacccgcaatgataacccgcaagcggcgagccgcccgtgggataaagagcgtgatggcttcgtactgggcgatggtgccggtatgctggtacttgaagagtacgaacacgcgaaaaaacgcggtgcgaaaatttacgctgaactcgtcggctttggtatgagcagcgatgcttatcatatgacgtcaccgccagaaaatggcgcaggcgcagctctggcgatggcaaatgctctgcgtgatgcaggcattgaagcgagtcagattggctacgttaacgcgcacggtacttctacgccggctggcgataaagctgaagcgcaggcggtgaaaaccatcttcggtgaagctgcaagccgtgtgttggtaagctccacgaaatctatgaccggtcacctgttaggtgcggcgggtgcagtagaatctatctactccatcctggcgctgcgcgatcaggctgttccgccaaccatcaacctggataacccggatgaaggttgcgatctggatttcgtaccgcatgaagcacgtcaggtcagcggaatggaatacacgctgtgtaactccttcggcttcggtggcactaatggttctttgatctttaaaaagatctaagttgtcatttcccacccatataaaaggtccgcttgcgggccttttttcttagcttttattccgacttgttccgtagtgaacatgctgccacactaacaattctctgataaggagccggtatgttcttaattaacggtcataagcaggaatcgctggcagtaagcgatcgggcaacgcagtttggtgatggttgttttaccaccgccagagttatcgacggtaaagtcagtttgttatcggcgcatatccagcgactacaggatgcttgtcagcggttgatgattttctgtgacttctggcctcagcttgaacaagagatgaaaacgctggcagcagaacagcaaaatggtgtgctgaaagtcgtgatcagtcgcggtagtggcgggcgagggtacagcacattgaacagtggaccggcaacgcggattctctccgttacggtttatcctgcacattacgaccgtttgcgtaacgaagggatgacgttggcgctaagcccggtgcggctggggcgcaatcctcatcttgcaggtattaaacatcttaatcggcttgagcaagtattgatccgctctcatcttgagcagacaaacgctgatgaggcgctggtccttgacagcgaagggtgggttacggaatgctgtgcggctaatttgttctggcggaagggcaatgtagtttatacgccgcgtctggatcaggcaggtgttaacggcattatgcgacaattctgtatccgtttgctggcacaatcctcttatcagcttgtcgaagtgcaagcctctctggaagaggcgttgcaggcagatgagatggttatttgtaatgcgttaatgccagtgatgcccgtacgtgcctgtggcgatgtctccttttcgtcagcaacgttatatgaatatttagccccactttgtgagcgcccgaattagtcatgaaaaaagtgttattgattatcttgttattgctggtggtactgggtatcgccgctggtgtgggcgtctggaaggttcgccatcttgccgacagcaaattgcttatcaaagaagagacgatatttaccctgaagccagggaccggacgtctggcgcttggtgaacagctttatgccgataagatcatcaatcgcccacgggtttttcaatggttgctgcgtatcgaaccggatctttctcactttaaagccgggacttaccgctttacaccgcagatgaccgtgcgcgagatgctgaaattgctggaaagcggtaaagaagcacagttcccgctgcgactggtagaagggatgcgtctgagcgactacctcaagcaattgcgtgaggctccgtatatcaagcacacgctgagtgacgataagtacgccaccgtagcgcaggcacttgaactggaaaacccggagtggattgaaggttggttctggccagacacctggatgtataccgccaataccaccgatgtcgcgttactcaagcgagcgcacaagaaaatggtgaaagcggtcgatagcgcctgggaagggcgtgcggacggtctgccttataaagataaaaatcagctggtgacgatggcatcaattatcgaaaaagaaaccgccgttgccagtgaacgcgatcaggttgcctcggtatttatcaaccgtttacgcattggtatgcgcctgcagaccgacccaaccgtgatttacgggatgggagagcgttataatggcaaactttctcgtgcagacctggaaacgccgacagcgtataacacctataccattaccggtttgccgccgggtgcgatagctacgccgggggcggattcgctgaaggctgctgcgcatccggcaaaaacgccgtatctctattttgtggccgatggtaaaggtggtcacacgtttaataccaatcttgccagccataacaagtctgtgcaggattatctgaaagtgcttaaggaaaaaaatgcgcagtaagtatatcgtcattgaggggctggaaggcgcaggcaaaactaccgcgcgtaatgtggtggttgagacgcttgagcaactgggtatccgcgacatggttttcactcgggaacctggcggtacgcaacttgccgaaaagttaagaagcctggtgctggatatcaaatcggtaggcgatgaagtcattaccgataaagccgaagttctgatgttttatgccgcgcgcgttcaactggtagaaacggtcatcaaaccagctctggctaacggcacctgggtgattggcgatcgccacgatctctccactcaggcgtatcagggcggaggacgtggtattgaccaacatatgctggcaacactgcgtgatgctgttctcggggattttcgccccgacttaacgctctatctcgatgttaccccggaagttggcttaaaacgcgcgcgtgcgcgcggcgagctggatcgtattgagcaagagtctttcgatttctttaatcgcacccgcgcccgctatctggaactggctgcacaagataaaagtattcataccattgatgccacccagccgctggaggccgtgatggatgcaatccgcactaccgtgacccactgggtgaaggagttggacgcatgagatggtatccatggttacgacctgatttcgaaaaactggtagccagctatcaggccggaagaggtcaccatgcgctactcattcaggcgttaccgggcatgggcgatgatgctttaatctacgccctgagccgttatttactctgccaacaaccgcagggccacaaaagttgcggtcactgtcgtggatgtcagttgatgcaggctggcacgcatcccgattactacaccctggctcccgaaaaagggaaaaatacgctgggcattgatgcagtacgtgaggtcaccgaaaagctgaatgagcacgcacgcctaggtggtgcgaaagttgtctgggtaaccgatgctgccttactgaccgacgccgcggctaacgcattgctgaaaacgcttgaagagccaccagcagaaacctggtttttcctggctacccgcgagcctgaacgtttactggcaacattacgtagtcgttgtcggttacattaccttgcgccgccgccggaacagtacgccgtgacctggctttcacgcgaagtgacaatgtcacaggatgcattacttgccgcattgcgcttaagcgccggttcgcctggcgcggcactggcgttgtttcagggagataactggcaggctcgtgaaacattgtgtcaggcattggcatatagcgtgccatcgggcgactggtattcgctgctggcggcccttaatcatgaacaagctccggcgcgtttacactggctggcaacgttgctgatggatgcgctaaaacgccatcatggtgctgcgcaggtgaccaatgttgatgtgccgggccttgtcgtcgaactggcaaaccatctttctccctcgcgcctgcaggctatactgggggatgtttgccacattcgtgaacagttaatgtctgtcacaggcatcaaccgcgagcttctcatcaccgatcttttactgcgtattgagcattacctgcaaccgggcgttgtgctaccggttcctcatctttaagagagacatcatgtttttagtcgactcacactgccatctcgatggtctggattatgaatctttgcataaggacgtggatgacgttctggcgaaagccgccgcacgcgatgtgaaattttgtctggcagtcgccacaacattaccgggttatttacatatgcgggatctggtaggcgaacgtgacaacgtcgtattttcttgtggcgtgcatccactcaaccagaatgatccctacgatgtagaagatttacgccgtctggcggcagaagagggtgttgtagcgctgggtgaaaccgggctggattattattacacaccggaaactaaagttcgtcagcaagagtccttcatccatcatatccagattggtcgtgaactgaacaagccggttatcgtccatacccgtgacgcccgcgccgatacgctggcaattctgcgcgaagaaaaagtgacggattgcggtggcgtactacactgttttacagaggacagagaaacggcgggtaaattactggatctcggattttacatctccttttccggcattgtgaccttccgtaatgcggagcaacttcgagatgctgcgcgttatgtccccctggatcggttactggtggaaactgactcaccttaccttgcgccggtaccgcatcgaggaaaagagaatcaacctgcgatggttcgtgacgttgcagaatacatggctgtgttgaaaggtgttgccgttgaagaactggcgcaggtaaccaccgataacttcgcccgtctgtttcacatcgacgcttcccgccttcaatccatccgttgaatgagtttttttaaagctcgtaattaatggctaaaacgagtaaagttcaccgccgaaaattgggcggtgaataaccacgtttgaaatattgtgacatatgttttgtcaaaatgtgcaacttctccaatgatctgaagttgaaacgtgatagccgtcaaacaaatcggcactgaattattttactctgtgtaataaataaagggcgcttagatgccctgtacacggcgaggctctccccccttgccacgcgtgagaacgtaaaaaaagcacccatactcaggagcactctcaattatgtttaagaatgcatttgctaacctgcaaaaggtcggtaaatcgctgatgctgccggtatccgtactgcctatcgcaggtattctgctgggcgtcggttccgcgaatttcagctggctgcccgccgttgtatcgcatgttatggcagaagcaggcggttccgtctttgcaaacatgccactgatttttgcgatcggtgtcgccctcggctttaccaataacgatggcgtatccgcgctggccgcagttgttgcctatggcatcatggttaaaaccatggccgtggttgcgccactggtactgcatttacctgctgaagaaatcgcctctaaacacctggcggatactggcgtactcggagggattatctccggtgcgatcgcagcgtacatgtttaaccgtttctaccgtattaagctgcctgagtatcttggcttctttgccggtaaacgctttgtgccgatcatttctggcctggctgccatctttactggcgttgtgctgtccttcatttggccgccgattggttctgcaatccagaccttctctcagtgggctgcttaccagaacccggtagttgcgtttggcatttacggtttcatcgaacgttgcctggtgccgtttggtctgcaccacatctggaacgtacctttccagatgcagattggtgaatacaccaacgcagcaggtcaggttttccacggcgacattccgcgttatatggcgggtgacccgactgcgggtaaactgtctggtggcttcctgttcaaaatgtacggtctgccagctgccgcaattgctatctggcactctgctaaaccagaaaaccgcgcgaaagtgggcggtattatgatctccgcggcgctgacctcgttcctgaccggtatcaccgagccgatcgagttctccttcatgttcgttgcgccgatcctgtacatcatccacgcgattctggcaggcctggcattcccaatctgtattcttctggggatgcgtgacggtacgtcgttctcgcacggtctgatcgactttatcgttctgtctggtaacagcagcaaactgtggctgttcccgatcgtcggtatcggttatgcgattgtttactacaccatcttccgcgtgctgattaaagcactggatctgaaaacgccgggtcgtgaagacgcgactgaagatgcaaaagcaacaggtaccagcgaaatggcaccggctctggttgctgcatttggtggtaaagaaaacattactaacctcgacgcatgtattacccgtctgcgcgtcagcgttgctgatgtgtctaaagtggatcaggctggcctgaagaaactgggcgcagcgggcgtagtggttgctggttctggtgttcaggcgattttcggtactaaatccgataacctgaaaaccgagatggatgagtacatccgtaaccactaatccgtaagacgttggggagactaaggccgccagatggctgccttttttacaggtgttattcagaattgatacgtgccggtaatgctgaaattacgcggtgcgccgtagacgatagaaccttccatgttggtatcgtaggttttgtcgaacaggttattgacgttcccctgtaacgagaagtttttcgtcacctggtagcgggtgaagagatccaccagcgcgtagctaccttgctcggcgcggaaggtgccatacggtgtcacggtgtcggtatacacgcgattttgccagttaacaccaccgccgactgtcaactctggcatgacaggcaaccgatagctggtgaacattttaaccgtggtgcgtggcagattaggattaacggcgtttccttcgttatcctctgcaatatagcgcgttgcgccaaatgtcagctgccagttgtcggtaattgcgccgttgagttcaaattccacccctttactgactgtcccatccaccgctttataggcggtttcgccgttgctgccggggataggtgtaccggtggactgagcgacattatcctgctcaatacggaagatggctaacgtggtggtcagacggctattcatccagtccgatttcagacccagctcgtagttgttaccggtgattggagccagatatttgcctgaactgtcacgatcattttgcggctggaaaatagaggtatagctggcgtaggtcgaccagttgtcattgatgtcaaacaccagaccagcgtaaggcgtggtgtggtttttctccatgctgtaagtcagcgtatcaacccgccagttggtataacgtgcgccgaggatcagatgcagcggatcggcaagggtgactcgagtagcagcatataacgatttcatatgtgtggtatcgtcctgtgccaggctctgtggtgaccagtcggtttgtgggaaattgccattaaagttgtagaaactgccaatttcatccgggaagatgttggcccatgaactgaagtaacgattgttttgtttgctgtaactgccaccaaacactagattgtgctgacgaccaaacaattcataactaccgtcagcgaacaaatccagcgcatcaactttacgtttgccactgttccaaccggtgccgccgacataatcaaagctaggtccataattactgtatggcccaaccagcataccatccgctttgtttacataggcatcgacatacatcattttgctgtcaaattcgacttcagagtgggtggcattcagtgtcgcttgccaggtatcagcaaaccgctgcttcagggtcataaagaccttgttgatctctttatcgttgtacgcccagtcaggtgcggtactgcgtgcacgatcgtaactgttgctgctgccatcagtattccagcgcggtaaaccgccccaggttgggctattaacatcaatgcgctgatattcgtaaccggctgaaagcgtcgtaagatcgcctaaatcagcatcgacaatgcccgagaagaaggtcttttcactgttgtagcggtccagccatgagtcgttattctggtagccgccgacaattcgcgcgcggattttaccgtcttcggtgagtgggctttgtaaatccgccacataccgttctttgttccagctaccgtattccgccgagacatcgcctttaaattcacgactggtcgcgtgttttcgaaccatattaattgccgcagatggattacccgtcccggtcatgagtcctgtcgcgccacgcactacttctacgcgttcaaagagtgccatatcagaaagtgcgtcgcccagattccagcgcgattcaaaataggtggggataccatcaaccatatagttatcgatctggaatccacgggaataataaagagcacgatcggaatccgcctgacttttgctgatccccagcgtgttttccatcacttcgcccagcgtttgtaactgctgatcttccatccgctgctggctaacaatagtgaccgactgaggaatatcaagttgagtcatctgcattttggtacccgcagaggtagacgttacgctgtaatcattttcgccatcatctggagctgtggctgaaccctcaacaatcaccgtttcttcagtggctggtgcagcaaaagcggcagaaggtaatagtgccagtgctatgcaaccggcaagtagtgacggtttggtgatggcttgatattgattatccctgttaaattgtgttgaaagcatttgaaatctcttggtttatgttgtcgtcaggctcatgccggaggagggtgatgagcggttatatttagtgtgcgaataattttgtttgtaaatgcaaatgagaaatatgcgcattcatatttgtcgtgtaaaccaaacagagaatgtcttttcagcgcattcgcaggcagaaatgggaataatggcgatatatacggcagcaaaacgattttttgcttaagaaatcgtgagttaaggttgaaagagcaggtttaactcgaccatactctatactcgcagtgtggcgcggcgtagcatggcgcaacgcatggctatttgaaaaaggaaaatgtcgtggcagaagaaactatattcagcaaaattattcgtcgtgagatcccctccgatatcgtctaccaggatgatctggtaacggcgtttcgcgatatttcgccgcaagcgccaacgcatattctgatcattccgaatatcctcattccgactgtgaacgacgtgtcagctgagcatgagcaggcgctgggacgcatgatcaccgtagcggcaaaaattgctgagcaagaaggtattgccgaagatggctatcgtctgatcatgaataccaaccgccatggcggacaagaggtttaccacatccatatgcacttgttgggtggccgtccgctgggaccaatgctggcgcataaaggtctgtaacgatgagaaaaggatgctttgggctggtgtctctggcgttgttactgctggtgggctgtcgttcacatccggaaattccggtgaatgatgagcaatcgctggtgatggagtcatctttattggctgcgggcatcagtgcagaaaagcccgtcctttcgacgtctgatattcaaccttcagcatcctcaacgctttataacgaaaggcaagaacccgttaccgttcattatcgtttttactggtatgacgccagagggctggagatgcatcctctggaaaggccacgcagcgttagcattcccgcacattcggcggtaacgctgtacggcagcgccaattttctgggggcgcacaaagtcagactttatctatatttgtaaggggtgaatcttgatgacaaaaatgagtcgctacgccttgattaccgcgctggcgatgtttctcgccgggtgtgtggggcaacgtgaacctgcaccggtagaagaagtgaaaccagcgccggaacaaccagccgagccacaacagcctgtccccacagtgccctcggtgccgacgatcccgcagcagccaggcccaattgagcacgaagatcaaacggcaccgcctgcgccgcatattcgccattatgactggaatggcgcaatgcagccgatggtcagtaagatgcttggggctgacggggtgactgcgggtagcgtcctgctggttgatagcgttaacaaccgtactaacggttcgctgaatgccgcagaagcgaccgaaacgctgcgaaatgcgctggctaataacgggaaatttaccctggtttccgcccagcagctgtcgatggctaagcaacagttaggtttgtcgccgcaggacagtttaggtacccgtagtaaagccataggcattgcccgcaatgtcggcgctcattacgtgctgtactccagcgcctctggcaacgttaacgctccgaccctacaaatgcagctgatgctggtgcagacgggcgaaattatctggtcaggtaaaggtgccgtttcgcagcaataatcccatcacgcgcgacgaattgctgtcgcgctttttcccgcagtttcatcccgtcacgacgtttaatagtgggcttagtggcggtagttttctcattgaacatcagggccagcgttttgttgtgcgtcagccgcacgatcctgatgcgccgcagtccgcgttcttgcgccagtatcgggctttatcacaactacccgcaagcattgcaccgaagccgcatttatatctccgtgactggatggtagtcgactatctgcccggcgcggtaaaaacgtatttgccggataccaacgaactggcaggcttgctgtattatcttcatcaacaaccacgttttggctggcgaataacgctgttgcccttactggaactgtactggcagcaaagcgatccggcgcggcggactgtgggttggctgcgaatgttaaaacgtctgcgcaaagcgcgggaaccacggcctttacgcttaagtccattgcatatggatgtccacgccggaaatttagtgcatagcgcgtcagggttaaaactcatcgactgggagtatgccggagatggtgatatcgcgctggaactggcggcggtgtgggtggaaaatactgaacagcaccggcaattggtcaatgactatgccactcgcgcgaagatttatccggcgcaattatggcgtcaggtcaggcgatggtttccctggctgctgatgctcaaagcagggtggtttgagtaccgctggcgacaaatcggcgatcaacaatttatcaggctggccgatgacacctggcggcagctattaataaaacaataaggagagcagtgtgggtccagtaatgttggatgtcgaaggttacgaactggacgcggaagagcgtgaaatactggcgcatccgctggtgggagggctgattctctttacgcgtaactatcatgatcctgcccagttacgtgaactggtgcgccagatccgcgcagcatcgcgcaatcatctggtggtggcggtagatcaggaaggtggacgcgtgcagcgttttcgcgaaggttttacccgcttaccggcagcacaatcctttgctgcgctgttgggaatggaagagggcggcaaactggcgcaagaggcgggttggctgatggccagcgaaatgatcgctatggatattgatatcagctttgcgccagtgctggatgtcgggcatatcagcgcggcgattggcgagcgttcttatcatgccgatccacaaaaagccctggcaattgccagccggtttattgatggtatgcatgaagccggaatgaaaacgaccgggaaacacttcccaggacacggtgcagtaacggcagactcacacaaagaaacaccgtgcgatccacgtccacaagcggagattcgcgctaaagatatgtcggtcttcagttccttaatccgcgaaaataaactcgacgccattatgcctgcgcatgtgatctacagtgatgttgatccgcgtccggcgagcggttcttcctactggctgaaaaccgttttgcgtcaggaactgtgttttgacggtgtaattttctctgacgatttatcgatggaaggtgccgcgattatgggcagttatgccgaacgcgggcaggcatcactggacgcaggttgcgatatgatcctggtctgcaataatcgtaaaggggccgtcagcgtgttagataatctgtcaccgatcaaggcagaacgtgttacacgtttgtatcataaaggttcattttcgcgacaggaactgatggactcggctcgctggaaggcgatcagcacccgtctgaatcagttacatgaacgctggcaggaagagaaagcaggtcactaaccctggcttatgtgaggaagcgatgattatctatttacacggttttgactctaacagtccgggtaaccacgagaaagtcttacaattgcagtttattgacccggatgtacgcttgataagctacagtacgcggcatccgaaacatgatatgcagcatctgctcaaagaagtggacaaaatgttgcaactgaacgtcgacgagcgtccgctgatttgcggcgttggtctgggcggatactgggcggaacggattggttttctttgcgatatccgccaggtgatcttcaaccctaatttgttcccttatgagaacatggaaggcaagattgatcgcccggaagagtatgccgatattgccactaagtgtgtgaccaacttccgcgagaagaatcgcgatcgttgcctggtgattttgtcgcgtaatgatgaagcgcttaacagccagcggacatctgaagagttgcatcattattacgagattgtctgggacgaagagcagacgcacaaattcaagaatatctccccgcatttgcagcgcattaaggcgttcaaaaccctcgggtaaatgccctcgtcgcatcaggtaaccttgccggtacctgatgcgctccgaattctgtaagtcggataaggcgtttacgccgcatccgacagtcgagcatcaatgcctgatgcgatgctgcgcatcttatcaggacgaccaaacgccctcgatatacgcgtcaccctatatcacccttccggacttgctcaaataataaacaataaactctgttttttgatctcacccggtaaagtcgcctatcttttcagcaacaaaacttgattaacatcaattttggtatgaccaatgcaccattcatgttattctcaatagcgaagaacattttcattgctgtaacctgttgttaattaagagctatgtttataaccattaattaacaattggttaataaatttaagggggtcacgttgactacgccattgaaaaaaattgtgattgtcggcggcggtgctggtgggctggaaatggcaacacagctggggcataagctgggacgcaagaaaaaagccaaaattacgctggtcgatcgtaaccacagccatctgtggaaaccgctgctgcacgaagtggcgactggctcgcttgatgaaggcgtcgatgcgttgagctatctggcccatgcgcgcaatcatggtttccagttccagctgggttccgtcattgatattgatcgtgaagcgaaaacaatcactattgcagaactgcgcgatgagaaaggtgaactgctggttccggaacgtaaaatcgcctatgacaccctggtaatggcgctgggtagcacctctaacgatttcaatacgccaggtgtcaaagagaactgcattttcctcgataacccgcaccaggcgcgtcgcttccaccaggagatgctgaatctgttcctgaaatactccgccaacctgggcgcgaatggtaaagtgaacattgcgattgtcggcggcggcgcgacgggtgtagaactctccgctgaattgcacaatgcggtcaagcaactgcacagctacggttacaaaggcctgaccaacgaagccctgaacgtaacgctggtagaagcgggagaacgtattttgcctgcattaccgccacgtatctctgctgcggcccacaacgagctaacgaaacttggcgttcgcgtgctgacgcaaaccatggtcaccagtgctgatgaaggcggcctgcacactaaagatggtgaatatattgaggctgatctgatggtgtgggcagccgggatcaaagcgccagacttcctgaaagatatcggtggtcttgaaaccaaccgtatcaaccagctggtggtggaaccgacgctgcaaaccacccgcgatccagacatttacgctattggcgactgcgcgtcatgcccgcgtccggaagggggctttgttccgccgcgtgctcaggctgcacaccagatggcgacctgcgcaatgaacaatattctggcgcagatgaacggtaaaccgctgaaaaattatcagtataaagatcatggttcgctggtatcgctgtcgaacttctccactgtcggtagcctgatgggtaacctgacgcgcggctcaatgatgattgaaggacgaattgcgcgctttgtatatatctcgctataccgaatgcatcagattgcgctgcatggttactttaaaaccggattaatgatgctggtggggagtattaaccgcgttatccgtccgcgtttgaagttgcattaatcgacgtacactggcggatgtggcataaacgcctcatccgccctggacaaatggtacgagcggtaggcctgataagacgcgttaagcgtcgcatcaggcattccttcagacttctccgaatccttaagtatttccagccattcccgcgcttttcatcttctgtctgatagctgcttttctccttcgcttgcatgattggcataactgcaaagaaggaggtgttcccgtgaataaatcaatgttggcgggtatcgggattggtgtcgcagctgcgctgggcgtagcggcagtggccagtctgaacgtgtttgaacggggcccgcaatacgctcaggttgtttctgcaaccccaatcaaggaaacggttaaaacaccgcgtcaggagtgtcgcaacgtcacagtgacccatcgtcgaccggtgcaggatgaaaatcgcattaccgggtcggtgctcggcgctgttgctggcggcgtgatagggcatcagtttggtggtggtcgtggtaaagatgtcgccactgttgtgggggcgctgggtggtggatatgccggtaaccagatccagggctctctccaggaaagcgatacttacacgactacgcaacagcgttgtaaaacggtgtatgacaagtcagaaaaaatgctcggttatgatgtgacctataagattggcgatcagcagggcaaaatccgcatggaccgcgatccgggtacgcagatcccgctagatagtaacgggcaactgattttgaataacaaagtataacaaggctgtactctgcaatttggcccctcattcgctcaggctgaggggctttttttgcgacttatttcaccagttcgggccataaacgcaaagtcgttccggcaatctgcatcagtttttccagcgatgcaccttcgcgtgcgctgatcgacatcccctgaataatacaattaaggaattctgccagatgtgtcacgtcacagtgggtcgggatttccccgcgcgcttgtcgttgacataaaaactgctgcaaagtgcgctcttgcatcgcatggcgtgatttcaacgtattggcgatatctcctgaatctggggagagggtggtgcagttgttgatcatgaagcagcctgccggggtgtctttgctggtaaagcagttggcgatggcagcaaaatagtcagccagcgcagactccacgcttttctcttcacaaaacagctgtgcttcatgcttagcggcaaaacgatcgatatagcggtcgagaacggcacgaaataacccctctttgttggtaaattccgcgtatagcgtgggcgctttggctccggtcgcttcgacgaggtccgcaagagaagtcgcttcataaccgtgttgccagaacaatttcatggccttatcaagcgcggcatccctgtcgaacacttttgggcggccacggcttttttttacacattgtgttgagtcagttgccatgatgccgttgaacctggtgactgtgaatgaaaggttattataaaaataatcacctccgttcaccagtccagatcccataaaaataattgctttctatttaactgaaatttaaagatttttaaattaattaatgattgttataaaaatatcttgtatgtgatccagatcacatctatcatttagttatcgatcgttaagtaatttcttgcgacgtcattcatctgcataaggccactattatgaaaaacgtaaaaaccctcatcgctgcggcgattttaagctccatgtcatttgccaactttgcggctgtcgaagttcagtcaacgccagaaggccaacaaaaagtcggtactatcagtgctaacgcggggacaaatctgggatcgctggaagagcagctggcgcaaaaagcggatgagatgggcgcaaaatctttccgtattacttctgtaaccggtccgaataccctccatggaacagcagtaatttataaataagcattaaccctcattaatgcctgctactgctgattttttccccgcgacatgccgtgtcgcggggattttttttatccaggatttacagagtttgtgggctcacttgatgacggcggacatccaccggcatcccggaacggacatccatcacatgttgcatcacttcagcgtcagtttgtgctgcatctttaaatgattgcattgcgctattcagcgtaattggcagcagctgcggatcgtcatcaatcttctctgacagcggctgatgtacttcaaccagacgcgcaccgtttggttcggcagagacttttatcggagtgttgatgatattcactttggtgcctggggtgacctggctaaagagtgttttgatatcgtcatcccgcagacgaatacagccagaacttacccgcatgccaatgccgaaatcggcgttcgtaccgtgaagcaaataaacgccgccataggccgccagacgaatcgcatgatggcccattgggttatccggtccagccggcactaccgtaggcaactcaattccctgtgctttataacgggcgcggatgtttgccgttggcgtccaggttgggtttgcacgtttgtctgaaacggtggtcaccattgtcggtgtcagcgtgtcaccacctaactgaccaatacctattggatacacggttaccgaatttttacccggcgggtagtaatagagacgcagctccgcaatgttgatcacaatgccttcgcgcggcgcgtctggaagtagggtttgcaacgggatcgttaacacgctgcccgcgcgcggtacgtaaggatcaacgccggggttagcctgtaacagagcgagaaagccgacgttatattttttggcgatggcttccagagaaccaccgtcattttccaccacatgaaatttgttttcgccaaccagacgactgctcgctggcggcagcggctaggtgttggcttttgccggtagcgccacggcagcggcgaacgtaaaaaacgttagccagcgagaaaaacgcgttttgatcatcaccaaaaatcaataataaatataaggttattgtaataaacagataagcctgaattatggatggtgacagtgtcggatagtgcagggaagtgcaaagaatttgtaaatgttgcagatgggggcgcagaaacgcccccgatttaccattaagcgatcgcgttctcttccagttcacgcataaactggcgtacccattcgatacgcgttttccgctcactcaaatcctgaataaatttcaggcgcgtcggaccatcaaggcggtaatgctgcggctgtttttgcagcaaaccaatcaaccaggccggattaacgtgattcttctcggcaaattcgatcaccccgcctttctcattaccttccagcttcctgatccccagtttctgcgcttgctggcgcagacgggcaatatccagcagggtacgcgccggatctggcagcaggccgaagcgatcgataagctcgactttgatctcttccagttcgttttccgttttggcgctggcaatacgtttatagaacgacaaacgcgtattcacgtcaggaatgaaatcatctggcaatagcgacggcatccgcagctcgacttctgtttgctggctggtgagatcttccagcgacggctcgcgtccggctttcagtgcatcgacggcgttttccagcaactccatatacagcgagaaaccgatggtttccattgagccgctttgttcttcgccaagcagttcacccgcgccgcgaatctccagatcgtgcgttgccagcgcaaaacctgccccgagatcttccagcgaggcaatcgcttcaagacgtttttgtgcatcggtagtcatcgcttttggatgcggtgtcagcaaccatgcatatgcctgatgatgcgaacgtccgacgcgaccgcgtaactggtgcagctgcgccagaccgaagtgatccgcgcgttcaatgataatggtgttggctgtcgggatgtcgatcccggtttcgataatggttgtacaaaccagcacgttgaaacgttgatgatggaaatcattcatcacccgttccagttcgcgctcgcgcatctgcccgtgaccgatggcgatccgcgcttctggcaccagttctgccagccgttcggcagctttctggatgttttccacatcattgtagagataataaacctgccccccgcgcaaaatttcacgcaggatcgcctcccggaccaccaggctgtcatactcacggacaaaggttttaactgccagacgacgggcgggcggcgtggcgataatcgacaggtcacgcattccgctcattgccatattcagcgtgcgtgggatcggcgttgcagtaagcgtcagaatatccacgttcgcgcgcatcgctttaatgcgctctttatgacgcaccccgaagcggtgttcttcatcgacaatcagcaggcctaaatctttaaacttgacgtcactttgcagcagtttgtgcgtaccgatcagaatatcgattttcccttccgccacttccgcaaggatttgcgtctgctctttggcgctgcggaaacgggagatcatttcgatacgtaccggccagttggcgaaacggtcgcggaagttgtcgtaatgctgctgcgcgagaagggtggtaggcaccaacaccgccacctgcttgtggttatctactgccaggaaagcggcgcgcatcgccacttctgttttaccaaagccaacatcgccgcacaccagacgatccattgccagcggctgacacatgtcgctaagtaccgcattaatggcctgcgcctgatccggcgtggtttcaaacgggaagctgtcgcagaacaactgatactgctcacgatcgtgtttaaacgcgaagccctctttggcggcgcgttgcgcgtagatatccagcaattccgccgccacatcacgcactttttccgccgctttctgccgcgcgcgtgaccacgcatcgccgccaagtttatgcagcggggcgttttcttccgcgccacctgcgtaacggctaatcagatgcagtgacgacaccggaacatacagtttggcgtcgttggcataggtgagcatcaaatactcgccagtaatgccgcccgcttcgagcgtggtcattccggcatagcgcccgacaccgtgctccagatggaccaccggctgaccaatatgcagctccgcaaggttacggatcagtgtatcggggttgatggtgcggcgagaatcctgacgacggcgggcaacacgttcaccgagcagatcgctttcgcagatcagcgccagattacgcaccttatcgacaaaaccatgttcggcagcgccaatcatcagataacgcccacggtcgctggcttcatcaagacgcataatgcgttgcggagcaattttaattcgtgcgagcagttcacccagcgcttcacggcgaccttcactttctaccgagaacaccaccggaccgtcgaaagtctcgaggaacttacgcagcgcatccagcggcgctttttgttgtgcctgaacggccaggtctggcagtttctggaaacctaaattggcattcgcggcttttgtcggtaaatgttcagtttttagctgcacccggggccagtttttcagctctgagaagagctcgtccacccgcagccagagcgattgtggtggcaacagcgggcgcatcggatcgacgccgcgattctcaaaacgcgccagcgtgtcagcctggaaacgttcggcactggtttccagatcgccagtattcacgagcaaggtattggcagggaaataactgaacagcggcggcagtggttcgctgaagaacaatggctgccagtactcgatcccggcaggtaatgtgcctttactcacttgctggtaaatatgttccggatcgcgcttcacttcgaaggtatcgcgccactggctgcggaacagttcaattgccgctttatcggtcggaaattcgtgcgcgggcagcagattgatcgcttctacttcctccagcgtgcgctggctgtcgacgtcaaacacccgcaggctgtcgatttcatcatcaaagaaatcaagacgataaggcagctcactccccatcgggaagagatccagcaacgcgccgcgcgtggcgtattcgccgtgctccatcacctggtcaacatggcgataaccggcgctgtccagttgggttcgtaatgcatctcgtgacaggcgctgaccttttttcatcaccagcgcatgaccgtggagaaaactgtgtgggcaaacgcgctgcataagcgtattcaccggaacaatcagtacgccacgctgcatcgtcggtagctggtaaagggtggaaaggcgcgaggagataatgtcctgatgaggcgaaaaactgtcgtagggaagagtttcccagtccgccagattcatcaccatctgatcggtgaactggctgatttcatcatgcaaacgcagagcattttgcatatctggtgcaatgagtaccaccggaccggcgtgacgttcggcaatttccgctaccagcgttgcacaggctgcgccggttaactcgcccagcagacgctgctcacccgctttgacgggcagtgtataacgatattgttcaggcataacggttgtcagattctcgttaggatatgcctcaacatatgggggcatatctctgataagcaatgctgttcattatccgtaatcgacatggtttagcaaattgaatcgccccggctggggcgatggtttaacgagagtaactgacggcagcgggcagtgaaggcggggagaacaacagatcgctgaatgcacgctgtgaaagttttcttaccagcaagcccgcaacagtacagatgaacaaactgacaaagggataaaccagcaggagtgtcagttcgacttgcggcgaccagcgtgctgcgttcatttgcgcaagcagagttaagctgaatatttcaaccagaatgcgatgggtggtgtagatagcaatggtgttggagccaatcacattcagcaggctggtggagcgcataccgaatcgttgctcgtactgataaaacagcttcatgatcaccacaatcgataccagcgacaacagcagcgagatagtaaacaaccaggcaccgaccgccagaacggtaagcaaagaagccatcagcagatggcggcgcaacggcacctctttaacacaggtcattattgttgcgccaaaccatgcgccaaggctgtaataaggcaaattgcggatcacactgttcattccccaccacggcgtgggaacgaaattaaccgccacactcagcagtacaaacaaggcgaatagtggcagcgccagacggctaaaaattttacataccacgaaatagacaattaacgcatacagataccacaagctggtgctggcggtgatcatcccgtgcaggaactcaccggtggaatcggcataagcggcattggaggcattgcttaaatcgcgctcaggtgccagccactggttcagcgcacttaacgccagccactgcaccacgccccaaagcgccagcacccagaagatgttccagatccgtttatcgagacaatttccccacggtacgctgtcgatatagcggcgaatcaaatagccggatataaagaaaaaaaccggcatacgaaagggtgcaaggtaaagattgaaatagatccagcatttgctcaggacttccgataacggatgctgaaaagtggtcatatgcggataaaaggtaatgaccgagtgataaatcaccaccagacaaatacataaccctttgatctggttaatccatagctctttttgtttcatcaggacaacacgctcttttttaatttacatgcggttgatcctgcgggttatgacccgaggtgtaatgggtatctgtctgtattggatgatttttcagattaagatcaggcggcaagattgatgataaaacatggcaatttagccgattgatttacgggggcttttcagattagccctgacgatcacttacagttcagacgtttacccatcttgctttcgcttatatactcgtgtctttgctacagcaaccagacggatttcatgtaccaacctgtcgctctatttattggcctgcgttacatgcgtgggcgtgcagcggatcgcttcggtcgtttcgtctcctggctttctaccatcggcattaccctcggggtgatggcgctggtcacagtattgtcagtgatgaacggctttgagcgcgagctgcaaaacaacatccttggcctgatgccacaggcaattctctcttctgagcatggctctcttaacccgcagcaactcccggaaacggcagtcaaactggacggcgttaatcgcgtcgcacctattactaccggtgatgtggtactgcaaagcgcgcgcagcgtggcggtcggggtgatgctcggtatcgacccggcgcaaaaagatccacttacgccgtatctggtcaatgtgaaacaaactgacctcgagccggggaaatataatgtcatcctcggcgaacaacttgcctcacagctaggcgttaatcgcggtgatcaaatccgcgtgatggtaccatctgccagccagttcacgccgatggggcgtattccaagccagcgcctgttcaatgtgattggcactttcgccgccaacagtgaagtcgatggctatgaaatgctggtgaatattgaggatgcctcgcgtctgatgcgttatccggcaggcaatattaccggctggcgtttgtggctggatgagccgctgaaagttgactctttaagtcagcaaaaactgcctgaaggcagcaaatggcaggactggcgtgaccgtaaaggcgagctgttccaggccgtacgcatggaaaaaaatatgatgggcttgctgctgagcctgattgtcgccgttgcggcgtttaacattattacctcactagggctgatggtaatggagaagcagggcgaagtcgcgatcctgcaaacgcaaggcttaactccgcgacaaatcatgatggtctttatggtgcaaggggccagcgccgggattatcggtgcgatcctcggagcggcgcttggcgcactgcttgccagccagttaaataatctgatgccgataatcggcgtcctgcttgatggcgcggcgctgccggtcgctatcgaacctttacaggtcattgttattgcgctggtggcgatggctatcgcgctgctgtctacgctttacccttcatggcgcgctgccgccactcaacccgctgaggctttacgttatgaataagatcctgttgcaatgcgacaacctgtgcaaacgctatcaggaaggcagtgtgcaaaccgatgtactgcacaatgtcagtttcagcgtcggcgaaggtgaaatgatggcgatcgtcggtagctctggttccggtaaaagtaccttgctgcacctgctgggcgggctggatacaccaacctccggcgatgtgatctttaacggtcaaccgatgagcaaactgtcttcggcggcgaaagcagaactgcgcaaccagaagctgggctttatttatcagtttcaccacctgctgccggattttactgccctggaaaacgtggctatgccactgctgattggcaagaaaaagcccgctgaaatcaacagccgtgcgctggagatgttaaaagcggtggggctggagcatcgtgcgaatcaccgcccatctgaactttctggcggcgaacgccagcgtgtggcgattgcccgtgcgctggtcaataatccgcgtctggtacttgcggatgagcctaccggtaacctcgatgcgcgtaacgccgacagcatcttccagttgcttggggaattgaatcgcttgcagggcaccgccttcctggtggttactcacgacctgcaactggcgaaacgtatgagccgccaactggaaatgcgtgatggacgtctgacggcggaactgagcctgatgggggcggagtaatggcgatgcctttatcgttattgattggcctgcgttttagtcgcggacggcgacgcggcggcatggtgtcgctaatctctgtcatttctaccattggcattgccctcggcgtggcggtattgatcgtcggcttaagcgcgatgaacggctttgaacgcgaactgaataaccgcattcttgctgtggtaccgcacggtgaaattgaggcggtaaatcagccatggactaactggcaggaagcactggataacgtgcaaaaagtgccgggtattgccgccgctgcgccgtatatcaatttcaccggactggtagaaagtggtaccaatctgcgcgcaattcaggtgaagggcgttaacccgcaacaggaacagcgtctgagcgcattaccctcgtttgttcagggggatgcctggcgcaattttaaagcgggcgaacagcaaattatcatcggcaaaggcgtggcggatgcgctgaaagtgaagcagggcgattgggtgtcgatcatgatccccaactcgaatcccgagcataaactgatgcagccaaaacgtgtgcgtttgcacattgccggtattttgcagttgagtggtcaactcgatcacagttttgccatgatcccgctggcggatgcccaacaatatcttgatatgggttccagcgtgtcaggtattgcccttaaaatgacggatgttttcaacgccaataagctggtacgcgatgcgggtgaagtgaccaacagctatgtttatattaaaagttggattggtacttacggctatatgtatcgcgatatccagatgatccgcgccattatgtatctggcgatggtactggtgattggcgtggcctgtttcaacatcgtctccaccttagtgatggcggtgaaagacaagagtggcgatatcgcagtattaagaacgctgggggcgaaagatggtttaattcgcgccatctttgtctggtatggattgctggcagggctgttcggtagcctgtgtggtgtgattatcggcgtagttgtttcactgcaacttaccccgattattgagcggattgaaaagctgatcggtcatcagttcctctccagcgatatctattttattgacttcctgccatcggaattgcactggctggacgtcttctacgtactggtcacagcattgttgctgagtcttttggcaagttggtatccggcgcggcgcgccagtaatattgaccctgcgcgagtccttagcggccagtaaaggcagtacattaaaacaaggagcggcaatgtattacgggtttgatattggtggaacaaaaattgcgcttggcgtgtttgatagcggtcggcagttgcagtgggaaaagcgggtgccgacaccgcgtgacagctatgacgcatttttagatgcagtatgcgagctggtagccgaagctgaccaacgttttggctgtaaaggttctgttggcatcggtattccgggaatgccggaaacagaagatggtacgctgtatgccgccaatgtccccgctgccagcggtaaaccgctgcgtgccgacctgagcgcacgtcttgatcgcgatgtacgccttgataacgatgccaactgttttgccctttcagaagcctgggatgatgaatttacgcaatatccactggtgatggggttaattctcggcaccggcgttggcggcgggctgattttcaacggtaaaccgattaccggtaaaagctacattaccggcgagtttggccatatgcgtctgccggttgatgcgttaaccatgatggggctggatttcccgttacgccgctgcggctgtggtcaaattggttgtatcgaaaattatctatcaggtcggggctttgcgtggctctggcaacactattatcatcaaccgttgcaggctcccgaaattattgcgctttatgatcaaggcgatgagcaggcaagggcgcacgttgagcgttatctggatttattagcggtttgtctgggaaatatcctgaccatcgttgactctgacctggtcgtcattggtggtggcttatcgaatttcccggcaatcacaacgcaactggcggacaggctgcctcgtcatctcttacctgtagctcgtgttccgcgcattgaacgcgcgcgccacggtgatgcgggaggaatgcgtggtgcggccttcctacatctaaccgattaaacaacagaggttgctatgctgtcgcgtcggggtcatcggttaagtcgttttcgtaaaaataaacgccgcctgcgcgagcgtttgcgtcagcgtatttttttcagagataaagtggtgccggaagcaatggaaaaaccaagagtactcgtactgacaggggcaggaatttctgcggaatcaggtattcgtacctttcgcgccgcagatggcctgtgggaagaacatcgggttgaagatgtggcaacgccggaaggtttcgatcgcgatcctgaactggtgcaagcgttttataacgcccgtcgtcgacagctgcagcagccagaaattcagcctaacgccgcgcatcttgcgctggctaaactgcaagacgccctcggcgatcgctttttgctggtaacgcagaatatagacaacctgcatgaacgcgcaggtaataccaatgtcattcatatgcatggggaattgctgaaagttcgttgttcgcaaagtggtcaggttctcgactggaccggagacgttacgccagaagataaatgccattgttgccagttcccggcacccttgcgcccgcacgtcgtttggtttggcgaaatgccactcggcatggatgaaatttatatggcgttgtcgatggctgatattttcattgccattggtacttccgggcatgtttatccggcggctgggtttgttcacgaagcgaaactgcatggcgcgcacaccgtggaactgaatctcgaaccaagtcaggtcggtaatgaatttgccgagaaatattacggcccggcaagccaggtggtgcctgagtttgttgaaaagttgctgaagggattataaagcaggaagcattgcctgatgcgctacgcttatcaggcctacaaggggaccacaataccgacgaaagagcgggataaaactttactgtcctgactcattagccacatccttgctaactaaaaaacgggcggtaataccaccgcccgtttgctgaattaacgtcctgctttcagcttctgataatactcttcataaatgctgctggctgcgccaacgtcattctgccattcaccatttttaatggtttcagcatccgggtagagcgttttatcgttcgccacttccgggcttaacagcttacgcgccgcaaggtttggcgttggataaccgatagtttcggcaacctgttttgccacatccgggcgcagcaggaagttgatcaatttcagcgcgccttctttgtttttggcatttgccgggatcgccaggctgtccatccagaaaatgccgccttctttcggccacaccacgtcaattggcgtacccgcctggcgtgcaacgaaagcagagccgttccagatcatgccgaggttaacttcgccttccatgtacgggttagccgggttatcggagttaaacgctgcgacgtttggcatcagttttttcagctcgttatatgcagcttcaatctctttcggatcggtggtgttaccggagtagcccagtttgcgcagcgccatctggaacacttcacgggcatcgtcggtcagcagcaggctacctttgtactctggcttccacagatctgcccaactggtgacagatttaggatccaccgcatcaccgttaacgccaatcgccgtcgcaccccagatatacggaatggagtagtcgttattcgggtcaaacggcttgttgagcatgtctggatcgagattgctgaagttcgttaacttcgacttgtcgatcttctggatcatcccttctttacgcattttatcgacgtaataggttgaaggaaccaccaggtcataggcaccgtctttgtacgttttcagcttggcgtacatggtttcgttcgactcgtaagtcgaatagatagccttaataccggtttctttggtgaactgttcaagcagtcctggcggcacgtactcggtccagttgtagaaatacagcgtgttgttgtcatcggcgtgagcggcgctcatgcccagtgccagagcacccgccgcgagcaggtggcgtgaccattttttcatttaacgtcccctgtgttacctttcgttttatcacgagcaataagctggctggcaataaccatcaccagcgacagcaccagtaatatggttgccagcgcgttaacttccggcgatacgccgactttgaccatcgaataaatttttaacggcagaatttcataacttggtccggtgacgaacgaagaaactaccacatcgtccatcgacagggtaaagcttaacacccagcccgccgccaccgctggcattgccagtggcagaatgatttttcgcagaatggtaaattcactggcaccgagatctttcgccgcttccagcatccgcacgtcaaaacctttcaggcgcgaatacaccgtcaccaccacaaacggcaggcagaaggtgatatgcgagaacagcagcgaccagaagccaagctgaatacccagcagcataaacagcaccagcagagaaatcgccatcacgatatctggtgacatcatcaccacaaacagcattccgctaacgaacggcttaccacgaaagcgataacggtacagcgcaactgccgtcagtgaaccgataagcgtagcaaatgtcgccgaaaacaccgccattgttagtgaatgctgcgctgcctgtaacaggctgtcgttgttcatcagcaggctataccatttggtggtaaaaccctgccagttgatgccaaagcgcgagctgttaaaggagttcacaatcaaaataatgattgggatatacaggtacgcgtagatagcggtcataaaaccgccgcgaagcagtcgaccgatcattcgagttccacctttttattcagcagacgagaagcgcgccagtaaaccagcaacatcaggcccattacgatagtcagcgtaatgctggtggctgcaccaaacggccagtcacgaatattgaggaactggaccttgatgacgttaccgatcagcaggtttttcgcaccgcccatcaggtcggatacatagaacaggcccatcgctggcagcatcaccagcagacatccggcaataattcccggcatcgtcagtggaataatgatacggataaaagtctgtaacttgctggcaccgagatcgcgcgccgcctcaagcaacggcttatccagtttttcgatactggagtacagcggcatcaccataaacggtagcagaatgtaaaccagaccgataatcaccgcactgggcgtgaacatgatacgaattggtgtgtcgataacgcccagccagagcaaaaactcgttgagatagcctttggtgctgaggaaaattttcagcccgtagatgcgaatcagtgagttggtccagaagggaacaatcagcagaaacagcagcagcggacgcaccttgtgtggcagcttcgccagaaaccaggcaaacgggtagcccagcaccaggcaggcgagggtggcgatcagcgccatattcagcgagtgcaatagcacttcaaaatagagcggatcgagcagacgcgtgtagttatccagcgtaaagaccattttgacgaaactggcgtcgtcgcgggtcaaaaagctggtgccaatgatcatcaggttgggcagaaagacaaacaacacaagccaaccgacaatagtgacaatcactacattctggaacttacttgtgttcttcatcagccagtacgacctcccagctttctacccaattaatggccattttttggtcgagagagtggtcaaagtcagggtcgtcttcattgaagaattcgctgaccatcaccatcttgccattttccagttcaacaaccgactccagcgtcatgcctttgtagttacgctcacgaacgtaaccaatcagcccttcagcgtggttgtcgtcgttaatctcttcaacacgtaagtcttccgggcgcagcagaacatgcagtttttgccccggttcaacggcgaagttaacgtagatattacattcgcggccttcaacgttggcgcgtacgcgctgctcgtcgagacgttcgatgacagtggcgttaaacatattgatttcgccaatgaagccggcaacaaacaggtttttcggctcttcgtaaatttcgcgcggtgtaccatcttgctcaatacgaccctcgcgcatcaccacaatcctgtctgacatggtgagcgcttcttcctgatcgtgagtgacaaagacgaaggtaataccaagcttacgctgtaacgctttcagctcgttctgcatttgcttacgcagtttgtaatccagcgctgagagcgactcatccagcaacaacagacgaggcttgttaaccaccgcgcgagcaatggcgacgcgttgctgttgaccaccagagagctgatgcggtttacgttgagcgaaggtttccagttgcaccatccgcagggcttccatcacgcggggcgtaatttcagcagcgggggttttttgcatgcgcaacccaaaggccacattttcgaacacggtcatgtgggggaaaagtgcgtagctttggaaaacagtgttcacatagcggttttccgccggaacgtgggtgatgtcctcgttatccagcatgatgcgtccggaatcaacagtttccagacctgcaatcaggcgaagaacggttgttttaccgcagccagaagggccaagcagcgtgaggaactcgccattgttgatagtcagatccagctggggaatgacctctttaccatcaaagcatttgcgaattcccgccaattgcaccagcggtgaaagcgaactcggttgtttattcaattttttactctgtcccatgtaaacgcaacggatggcttaccgatgcggggtttgtggttaaccaccttggtgactcttaatgagggcggtaattctacggcaaaccgcttgaatcgccaatctttgttgtgaattactggcttagctttatattcattaaggtaatgctgataaatattcccgcttgcaggggtaaaagtgacctgacgcaatatttgtcttttcttgcttcttaataatgttgtcacaaaaagtgagggtgactacatggataaactacttgagcgatttttgaactacgtatctctggatacccaatcaaaagcaggggtgagacaggttcccagcacggaaggccaatggaagttattgcatctgctgaaagagcagctcgaagaaatggggcttatcaatgtgaccttaagtgagaagggcactttgatggcgacgttaccggctaacgtccctggcgatatcccggcgattggctttatttctcatgtggatacctcaccggattgcagcggcaaaaatgttaatccgcaaattgttgaaaactatcgcggtggcgatattgcgctgggtatcggcgatgaagttttatcaccggttatgttcccggtgctgcatcagctactgggtcagacgttgattaccaccgatggtaaaaccttgttaggtgccgatgacaaagcaggtattgcagaaatcatgaccgcgctggcggtattgcaacagaaaaacattccgcatggtgatattcgcgtcgcctttaccccggatgaagaagtgggcaaaggggcgaaacattttgatgttgatgccttcgatgcccgctgggcttacactgttgacggtggtggcgtaggcgaactggagtttgaaaacttcaacgccgcatcggtcaatatcaaaattgtcggtaacaatgttcatccgggcacggcgaaaggagtgatggtaaatgcgctgtcgctggcggcacgtattcatgcggaagttccggcggatgaaagcccggaaatgacagaaggctatgaaggtttctatcacctggcgagcatgaaaggcaccgttgaacgggccgatatgcactacatcatccgtgatttcgaccgtaaacagtttgaagcgcgtaaacgtaaaatgatggagatcgccaaaaaagtgggcaaagggttacatcctgattgctacattgaactggtgattgaagacagttactacaatatgcgagagaaagtggttgagcatccgcatattctcgatatcgcccagcaggcgatgcgtgactgcgatattgaaccggaactgaaaccgatccgcggtggtaccgacggcgcgcagttgtcgtttatgggattaccgtgcccgaacttgttcactggcggttacaactatcatggtaagcatgagtttgtgactctggaaggtatggaaaaagcggtgcaggtgatcgtccgtattgccgagttaacggcgcaacggaagtaagcgaaaagggatgcggcatgtgatgccgcatccggcttaaatccaaacttacccttcgaagaaccaatacccgctattgaccagcgccgcgagcatcgcgaggaatgacggatcttccagcgcatcgccaaaattctccgcagtcagcgcaatgttgctggcgagtgcatccagtgccggacggtgcggggaatcgatcttctcaccattggcatacacgtcgtcgccaatgcgcaatacgcgcagaccacccaggcgcaccagcacatcaccttgtttcagcgcatcgtagatttcatctggctgataaggcggttctggcggcgcgatatccagttcatgacgtgactgggatataaactcgccaaaccattgcttaaagtgttccggctggttgatcaattcgagcatcatctcacgcagtttatccatctcttgaggcagaacatccgcaggatgagcgcgaggtggaacatcaggatcgctgtagtagttgccgcccagttcacgttgcagcacataatcggcaaatccactaatcagttcccgcgtatttggcgcgcgaaagcccacggaatagttcatcgcattttccagcgcgtagccttcatgcgggaatcctggcggaatataaagaatatcaccaggctccagctcttcatcgatgatggcttcgaacggatcgacctgtaacagatccggatgtgggcagtgctgtttcatttgcagcttttcgcccactcgccagcgacgacgtccggtaccctgaatgataaacacgtcgtactgatcgagatgcgggccgacgccgccgccaggtacagaaaaagaaatcatcagatcatcaatacgccagtccggtagttcacggaacggtcgcatcagcgcggcggtcggctcatgccagtggttcactgcctgtaccagtaatgaccagttggtttcaccgagatgatcgtagctttcgaacgggccgtggctgacctgccatttgccatcctggtgactgaccagtcgactgtcaacttcgctttccatcgccagacccgccaactcgtctggagagatcgggtcaataaaattattaaagccgcgttttaacaccaccgggcgtttctgccagtgacgttcaagaaaatcgggccagttaagagtgagttggtattccatgttaagcatccacaggctggtatctgcaaccgattataacggatgcttaacgtaatgcgtgaagtatggacatatttattcatctttcggcgcagaatgctggcgaccaaaaatcacctccatccgcgcaccgcccagcatgctctctccggcgacgattttaccctcatattgctcggtgatttcgcgggctaccgccagccctacaccttgcccagggcgtaaagtatcaacccgttgaccacggtcgaaaatgacctctcgcttgcttaatggaataccggggccatcatcctcgaccacaatatagagatgctcgtcggtttgccttgcagaaatttcgacaaactcgaggcaatatttacaggcattatccagcacgttgcccatcacctcgacaaaatcgttctgctcaccgacaaagctgatctctggcgaaatatcgagagagatattgacccctttgcgttgatacactttgttcagcgctgaggtgagattgtccagcagtggggcgaccggatgcagctcgcggctgagcaatgtcccgccgcgcatactggcacgatgcaggtagtagccaatttgctgtgaaatgcggctgatttgctccagcattaccggctcagcatcactgacgctcatcttttcactacgcagagaacgcagcgtactttgcagcaccgccagtggcgttttcagactatgggtcaggtcggtgagcgtcgtacggtatttgtcgtaacgttcgcgttcactttttaacaatcggttcaggtttcgtaccagactggtcagttctcgcgttgtggctggattgagcaattcgcggttatgttcttccagttcgcggacttcttttgccagggcttcgatggggcgtaaactccaccaggcggcgacccacagcagcgggatcactaacagcagattggctgagagcacatagataaaccagctccagaccatataggaactttttagctccaccggaatggtatccaccaccacaatggttaattttggcatccgcgatgttgccgggtagacgtttactgccaccgagtgggtcatctccgcgtcgtcatcatcttcccgcacttcctgcaactgttgctgtatcgaatgatctccactcagcaagaggctggtatcgttaacatccgcttcaatttcatgaaaaccattcgatttcagccagtcaggctggatcatcttcatcagccagggcacgtcacgttgcgcccataaaagctgcccgttctcatcataaattagcgtcatggtggggctttgcttgtcgatattttcgggtaactcgacatgcaacttattgttttcccacttcgcaagggtatagaacagattgctctcgccacgtaacagccgaaacgtagttttatcgaaactgacgctataaccgatcagcgcgaccattccgtaggcaagcgaaagcaccagtactaccgcagccgttgccaacagaaaacgtacccgcagcgagagcgggaaaaaaagacgcagtaattttttcatcagcgcaattcgaacaaatagccctggccgcgaacggtagtaatcacttcttgcggatattgtgcctgaatttttttgcgcagacgtcccatcagtacatcaatggtatggctttcccgcagctccgcatccggatagagttggagcattaacgaatctttgctcaccactttgccattattgcgtatcaacgtttccataatggtgtattcgaacgcggtcagtttgatcacttcgtcattaatagataattcacggcgagagagatcaacctgaaacggtggtagcgaaatgacctgtgaagccagaccgctattacgccgcattaatgcctgcattcgcgccatcacctcttcaatatgaaatggtttagtcacgtaatcatcagcaccagcacttaatacttcgactttgtcctgccagctttcacgggcggttaataccagaatcggcagtgaaacatcattgctacgccagcggcgaatcagtgacagaccgtcctcgtctggcaatccgagatcgacaatcgcaatatccggtaaatgttcattgagataataatcggcttctttggcatcttctgcatcatcgacctgatgaccagcatcctgaatctgaactttaaggtggtgacgtaacaacgcattgtcttcaacaaccagtacgcgcatttttatttctccctgtcttaattattaaaatagtgtaacgcgattatgtggttatgggggtaaacattaaataaaccagcggggaggggaggtaaagtgaaaaaataaaaagcggataatcttaataagcaggccggacagcatcgccatccggcactgatacgagtttatttcagctcatcaaccatggtgatggcgcgaccaatgtagtttgccggcgtcatcgctttcaggcgggctttctcttcttctggcaacgccagaccgtcgataaactgcttcatgccttcggcgtcaacgcgcttaccacgagtcagctctttcagcttctcgtacggtttttcgatgccatagcgacgcataactgtctggattggctcagccagcacttcccagttgtgatccagctcatccagcagatggtcacggttcacttccagtttgctcacgcctttcagggtggattgatacgcaatcagcgcataaccgatacccacgccgaggttacgcagcacggtggagtcggtcaggtcacgctgccagcgggaaaccggcagtttgcttgccagatgctgtaataccgcgttggaaaggcccagattcccttcggagttctcgaagtcgatcgggttaactttatgcggcatggtggaagaaccaatctcaccagcaatggttttctgtttgaagtggttaagggcgatataaccccagacgtcacgatcaaagtcgatcagaatggtgttgaagcgtgcaacgcaatcaaacagctcggcgatgtagtcgtgcggttcaatctgggtagtgtacgggttccattgaatacccagcgaggtgacgaactcttcgctgaactgatgccagtcaacttccgggtaagcggcgatgtgggcgttatagttaccgaccgcgccgttgattttgccgaggatctccacctggttaagctggcggtactggcgctccatacggtaggcgacgtttgccatctctttaccgatggttgacggcgtggctggctgaccgtgggtacgagacagcagcgggatatcgcggtactgaacggcgagatctttaatgccatcaatcagttgacgccagtacggcaggatcacttcatcacgcgcggttttcagcattaatgcgtgggagaggttattgatatcttccgaagtacaggcaaagtggatgaattcagaaaccgcgtgcagttccgggatctccgccactttttctttcaggaaatactcaaccgctttaacgtcgtggttagtggtacgctcgatggttttgatgcgtgcggcatcttcttcgctgaaattggcgacaattgcatcaaggtaaccgattgcgtcggcagcaaaagcaggaacttccttgatcgctgcgtgcgcggccagtttttgcagccaacgtacttcaacttgtacacggaatttcagcaaaccatattcgctgaaaatcccgcgcagcgcgctgactttatcgccgtagcgtccatcgacaggggaaacggcggtcagtgaggataattccatagatcacaactccggggttaaatgagcaagaatttgttttgcctgagtggtcaggcgattacgagaaaacatcagttgcagacgtccgccgccgacctggtgccagagcacggcggcgcgaatgcctgccagcagggttgcgcgaactttcgcctgcacttgtgggctttgcagtacagcaggggaaccggtgacctgaatgcgtgggccaagcgggctgatcacatcaacatagatagcagccatcgcgctcatcagcgtttcggactgtaaatcgaagtgttcgagctggcgttgcaggccgttgatccggttgcccagagtgtcgagcgcgcctttcgctgaggagagtttgcgctcaagcaccatcaagctgagtgtgtagcgggttaattcggcgtttaagccctggcgactgctggcattgagcacgccgagcagggtttccagcccgacgcgcaggttggcttcgctaccgccaaaaaccgccagcgtcgagctggggttcatatcaataatactgttgagtgagacgtgtagcgcatcggcatcacaatgcccctggtgagcgagttgttgcaccaggcgtgccgactgacaaataccggccagggcgagggtgatgtcatagtaattctttgccacgttcactgcttccttgttttaagtaaagataataatcagaccggcagcggcagacgctgctcaataataccgccaccgaggcacacttcaccgttatagaagacggcagactggcccggcgtcacggcggcaaccggttcatcgaaaatcacttcaatgcgatcatcgtccagcgccttgacggtgcaagggatatcggtctggcgatagcgggtttttaccgtgcaacgcatagtgccggtgaatggttcgcgatcgacccagtgcaactgctgggcaatcaacccgacagacatcagccgcgggtgttcatggccctgagcgacaaccagaatgttgttttcgacgtctttgtccaccacataccaaggttcttcggtgccttctttggtgccaccgatacccagacctttacgctgaccgagagtgtgatacatcagcccctggtgctcaccaatttcatcgccatcgacggtaatgattttgcccggttgccccgggagataacggcccaggaactcgcggaatttacgttcgccaatgaagcaaatgccggtagagtcttttttcttcgcggtgaccagaccaagatcttcagcaatcttacgcacctgcggtttttccagttcgccgaccgggaacaggctttgcgcaatctgctcatggctgagcgtataaaggaagtagctctggtctttattgctgtccagaccacgcagcaggcggctcttgccatcgacatcggcccgacgtacgtaatgaccggtagcgatataatcggcacctaaatcttcggcggcaaattcgaggaaagctttaaatttgatctctttgttgcacagaatatccggattcggcgtgcgaccggctttatattcggcaaggaacagttcgaagacattgtcccagtactcggcagcaaagttaacggtgtgcagttcaatgccgagcttgtcgcagacagcctgggcatcagccagatccgctgccgctgtgcaatattcctcaccgtcgtcttcttcccagttcttcataaacaggccttcaacctgatatccctgttgttgcaacagccaggcagaaacggaggaatcgacaccgccggacatgccgacgattactttttttgcggtttcagacattggatcactcacgacattgaacttcaaggcggcgtattctatcacgcagccttttagatgacaccctttgtaaaaggccagttaaaatcgccaatcatctccagcggatagcgttgcccactttgataacaacggatactttccgccaccagcggcgaacgaagatttgacgcctttaaaatttcttcggcgctgacccaacgacagcagtcgatatcgctgtcatgaggctgggtcgggcatatttgctcaagctcaatggcaaagaggaaacgcaaaaacggcgttttatctggcgcaatccactgatgcatacgaataaagtgttgcggttgcgcgctgatgccggtttcttcccatagctcacgggcggcagcttccactaaggtttcatcggcttccagatgcccggcaggttggttccataacgctttaccattaatcgtctcttcaacgactaaaaatttaccctctgcgtgcactacgcaagcaacggtaacgtgcggtttaaacattgtgcatccttattctgttgcttctcgccattcgccattggcaaggttatccaaagtgtaatcacccatcgcataacgaatcagtcgcagcgtggggaaaccaacatgggcggtcatgcggcgcacctggcgattacgtccttcatataaggtgatcttcagccagctggtgggaatacttttgcgttcacgaattggtggattccgcggccataaccacgctggttcgtcaaccagctccgcgccggcgggcagggtagggccatcatttaaggttacgccattgcgcaaggcttcaagtgcgtcttgtgtgggaataccttccacctgcacataatagattttcccggtgcgtttgcccggctgggttaaacgcgcctgcaacgcgccgttattggtcagcaccagtaacccttcgctatcgcggtcaagacgacctgctgcataaacgccctgaaccgggatgaattcttttaatgttttgcgtccggcttcatcggtgaactgcggaagaacatcgtagggtttattgaacaggatcacacgcgtgggctggttttcaggtttacgcctagtagaacgttgcgagctgaatcgcttaacctggtgatttctaaaagaagttttttgcatggtattttcagagattatgaattgccgcattatagcctaataacgcgcatctttcatgacggcaaacaatagggtagcattgacaagccaattacaaatcattaacaaaaaattgctctaaagcatccgtatcgcaggacgcaaacgcatatgcaacgtggtggcagacgagcaaaccagtagcgctcgaaggagaggtgaatggaaagtaaagtagttgttccggcacaaggcaagaagatcaccctgcaaaacggcaaactcaacgttcctgaaaatccgattatcccttacattgaaggtgatggaatcggtgtagatgtaaccccagccatgctgaaagtggtcgacgctgcagtcgagaaagcctataaaggcgagcgtaaaatctcctggatggaaatttacaccggtgaaaaatccacacaggtttatggtcaggatgtctggctgcctgctgaaacccttgatctgattcgtgaatatcgcgttgccattaaaggtccgctgaccactcctgttggtggcggtattcgctctctgaacgttgccctgcgccaggaactggatctctacatctgcctgcgtccggtacgttactatcagggcactccaagcccggttaaacaccctgaactgaccgatatggttatcttccgtgaaaactcggaagacatttatgcgggtatcgaatggaaagcagactctgccgacgccgagaaagtgattaaattcctgcgtgaagagatgggggtgaagaaaattcgcttcccggaacattgtggtatcggtattaagccgtgttcggaagaaggcaccaaacgtctggttcgtgcagcgatcgaatacgcaattgctaacgatcgtgactctgtgactctggtgcacaaaggcaacatcatgaagttcaccgaaggcgcgtttaaagactggggctaccagctggcgcgtgaagagtttggcggtgaactgatcgacggcggcccgtggctgaaagttaaaaacccgaacaccggcaaagagatcgtcattaaagacgtgattgctgatgcattcctgcaacagatcctgctgcgtccggctgaatatgatgttatcgcctgtatgaacctgaacggtgactacatttctgacgccctggcagcgcaggttggcggtatcggtatcgcccctggcgcaaacatcggtgacgaatgcgccctgtttgaagccacccacggtactgcgccgaaatatgccggtcaggacaaagtaaatccaggctctatcatcctctccgctgagatgatgctgcgccatatggggtggactgaagcggctgatttaattgttaaaggtatggaaggtgctatcaacgcgaaaaccgtaacttatgactttgaacgtctgatggaaggcgctaagctgctgaaatgttcagagtttggtgaagcgatcatcgaaaacatgtaatctctccatgagttaaatattgaaacgggcgtataacacgcccgttgttttatttatgtggatattattaatagcatatcgagcatatttatatgaagcccattacttgagcccatatgggcatatttttataatgcaactattatgtaaacatttatttgttattttgctttctcctggaggacactcttgactgcttttgagtaaactccataaattcttgttgaatggtgcaatgttataaatagtaataggatattctttttccttaaggataataccaagcttaaccggtgtaaatatacttccaggaggaagaaatatagtagattgataccagatgatcattttcatatcaccccatatggctgaaaaagatatgccgcatgtaggttgaattaccgtgtcaattactacccacttcatttgttatgtcttatcccacggtatttaatatagttcatttggatgttcatttctttattttgcatatgagtatattaccccttcaaaaaataaattaattaaaacgattgcttatataaaacaaaatttaaagcaaggaatctcaatggatgttaaacaaaatgagatttagtgaaaacaataaattattcacttcgttttagatttgtttagctataatgttatacattcaaatgactgaacatcctgtaattaaaacatagcctttatgctacttggtgccaatttgctaaacattatggttgcctttttatataacgataataatgaatataaacatgacatgagaataaggtttcaatttttgagttatataggaaaggtttaacctgttcctggctaaaatacatataactggatgatgactaaaccaaaacacatgtgcgttaagtattgaaacgggcgtatggcacacccgttgtttttataaatatattaaccgttataaaataacgtatagaaagtcaagtgatcacatttcaaatatcaatttgatagtattggcctggtgattatttatgggtagcaataaaaggacagtatttatcatccatagggatagtctctgtacttttattcccattatgctaatgccttactgaattatgaagcatttcttaagcatccaactttagctagattaatggtttattattttctacatcttcaatatataaaagcgtattatcaatggcgtagtaactgcgtttgttatgattaacatcagtaacccaacggaaaacgcccgcgcctgccagtgttgaacagtattcccgaaatgtagattttccgtaaatatgaagcaatgcggcctcttttattttagcagggttcttggtcgtactaacttttaacaggttcctggttcctcttaataacaaaaccgtgtcatcgtgagtaataattctgatgttatccgtagccagataataaatgtaatgtgcaatacggtgatgttttaattctgaataaaaccaggagaagttttgctcttttctcacttgctcaaacatcttttgaaaaacaacgacctgatccatcaggataataacctcttgttagttgtgagactgcgtagtgtgcacgatcggttttaccacttcaatctggtctgtcctttggctgtgatatgtacagagtgtgatagagggattacctgaattcttccggtgagcattttgcaacggaccagctccggtacaaatgctgttgtgggttcagattataacattctgtctaaggggcgggataaaggtgaaattagggggcatgaaagatgactttataaccttgctcaccccaatgttgtaaaagttcgttttgccttctcgttggtgccatgcctgtccagacaatcaatgtttgcgtcgggaacagttccgggcgcggcgattcaatgggatcagcaagaacagaaatgtgccatcctgacaatgataaacgccatgcttccagccacaatcgtgctctctcttcaacattccacgccatcagaatggcttctttaccgggcttacggcgcatttcgaaaagtgaggctgctgcatattcaattaatgcgccgtcaaacatactgctcataatgcgggaggtgttgtgatcaagcacgagacgctggcgaacaggaaggtaaacatgattaatcaattgatctactgggtactctcgacccagtgaaataattctcgcgcgtagtttggcaggattagccatacgaagaattgacatcatctcttcttgcaggcggttccagtcatcttccgtatcctggctggtggtttccagtaatgctttaactttgcctacagggacgccattacttatccaacgcttgatctcttcgatgcgttgtatgtcttcttcatcaaagagtcggtgtccgccttcactgcgctgtggttttaacaaaccgtagcggcgttgccaggcccggagagtgacaggattaatcccgcaacgttcagcaacatcaccaatgctgtaataagccacaattcctccttgcggtcataaatctccgccgcctgtacacgacccaataatactttgtacaatatacgctaaaattgtacaaagtataaataagatttcagctaaattggatgaaacattatatttaatgtggattaaatttaaacataacgtattcattttcacgatgatttactgaaatcatgtgaaagaatgtgctgaaaattattttttctctggccacgctatggaagggataccattcaatttagctttagcaaacagatctccctgaaacatctcaattcctgcggattcaagccacatccactcttctggtgttgccacgcccatagcactgacttgaatttcaagtgatgtacagcattttatgatcgcttgaataattgcctgccgtggcccgcttttatgaacattggtaatcaattcctgactgattttaattctgtcaggctggaagcgtgacaggagtaacaaaccggcaaaacctgcgccaaaatgatcaattgctacactgataccggcagccttaagcgatttaatcgcttctgcaaactcatcaaaccgagatataacttcactttcagtaaattcaacgatgatttgttcaggcaccagagcattggcctttatttcatcaagtaaaaaagagactgcgtcaggttcgttaaccagggtcataggtaatagattgattgaaatcattttatcaccgagctcaagtgcgtgtgccatcgcgaatgcaagcgccttacttttgagatccgctgtgtagatttccccgtctttacgctgcccaaccgctatggctgatgggcttcatttttttgcacaatggcttcaaaagcgattatccgccgcgataagggatgaaaggcaaagtggtcgtttatagttggtgaaagggtacaggaatcaagttctttatcagatccgtcagcgataaaaagccaggagtcttcggcagggatctcgaaataggttgattgttcggttgcaaggacaaaagtacgaaaaaattgtagcgctctgtcatcataagttagctgaaattttgatgtgcctttgtcgaatacggcctgtaaaacgtcatctcgctcgtgcaggcgcaaatcaaataattccattcccgctttgccaaaacggcgagcaggcgcgtaatcgcacagcagctcaacaatattatagtgccgtggatcctggcatatagcccgatatatcattttaacctgttcttccggaccttccagaagctggaaaaaatgagaaccattaaacagtaagatccctgttacgtcagactgcatgttcctgcgatttgctatcgaaaccatttcttcgatttttttgacaggttcgtcgtcacgtatatggctacgataaataagggtggtaagcattaacaggtgatgctgccaacttactgatttagtgtatgatggtgtttttgaggtgctccagtggcttctgtttctatcagctgtccctcctgttcagctactgacggggtggtgcgtaacggcaaaagcactgccggacatcagcgctatctctgctctcactgccgtaaaacatggcaactgcagttcacttacaccgcttctcaacccggtacgcaccagaaaatcattgatatggccatgaatggcgttggatgccgggcaactgcacgcattatgggcgttggcctcaacacgattttacgtcacttaaaaaactcaggccgcagtcggtaacctcgcgcatacagccgggcagtgacgtcatcgtctgcgcggaaatggacgaacagtggggctatgtcggggctaaatcgcgccagcgctggctgttttacgcgtatgacagtctccggaagacggttgttgcgcacgtattcggtgaacgcactatggcgacgctggggcgtcttatgagcctgctgtcaccctttgacgtggtgatatggatgacggatggctggccgctgtatgaatcccgcctgaagggaaagctgcacgtaatcagcaagcgatatacgcagcgaattgagcggcataacctgaatctgaggcagcacctggcacggctgggacggaagtcgctgtcgttctcaaaatcggtggagctgcatgacaaagtcatcgggcattatctgaacataaaacactatcaataagttggagtcattaccgtcgctttagactatacacagcataattttattaggttaatatttctacgaggctgacatgaataattcaatcccagagagatttattttttcaatgtgctttgtttaaaaatctcgagagggaggtgttcatgacgcatgggtatgttgatagtcatattattgatcaggctttacgcttgcgtttaaaagatgaaaccagtgtgattctttctgatctctatctgcaaatattgcagtacattgaaatgcataagactacactaacggatatcattattaatgacagggaatccgtgctctcttagaacttagactggccccctgaatctccagataaccagtatcacttaaataagtgatagtcttaatactagtttttagactagtcattggagagcagatgattgatgtcttaggaccggagaaacgcagacggcgtaccacacaggaaaagatcgcaattgttcagcagagctttgaaccggggatgacggtctccctcgttgcccggcaacatggtgtagcagccagccagttatttctctggcgtaagcaataccaggaaggaagtcttactgctgtggccgccggagaacaggttgttcctgcctctgaacttgctgccgccatgaagcagattaaagaactccagcgcctgctcggcaagaaaacgatggaaaatgaactcctcaaagaagccgttgaatatggacgggcaaaaaagtggatagcgcacgcgcccttattgcccggggatggggagtaagcttagtcagccgttgtctccgggtgtcgcgtgcgcagttgcacgtcattctcagacgaaccgatgactggatggatggccgccacagtcgtcacactgatgatacggatgtgcttctccgtatacaccatgttatcggagagctgcccacgtatggttatcgtcgggtatgggcgctgcttcgcagacaggcagaacttgatggtatgcctgcgatcaatgccaaacgtgtttaccggatcatgcgccagaatgcgctgttgcttgagcgaaaacctgctgtaccgccatcgaaacgggcacatacaggcagagtggctgtgaaagaaagtaatcagcgatggtgctctgacgggttcgagttccgctgtgataacggagaaaaactgcgagtcacgttcgcgctggactgctgtgaccgtgaggcactgcactgggcggtcactacgggcggcttcaacagtgaaacagtacaggacgtcatgctgggagcggtggaacgccgcttcggcaacgagcttccggcgtctccagtagagtggctgacggataatggttcatgctaccgggctaatgaaacacggcagtttgcccggatgttggggcttgaaccgaagagcacggcggtgcggagtccggagagtaacggcatagcagagagcttcgtgaaaacgataaagcgtgactacatcagtgtcatgcccaaaccagacgggttaacggcagcaaagaaccttgcagaggcgttcgagcattataacgaatggcatccgcatagtgcactgggttatcgctcgccacgggaatatctacggcagcaagccagtaatgggttaagtgataacaggtgtctggaaatataggggcaaatccatccggcggccagtgtctggggtaatgtgggcgtgcagctgggtgataatggctacaatgacaccgcagtgatggtgggcctgaaatataagttctgatccccgttagctaaaataccgcgtcgaattcatcgacgcggtaacatattaaatattattttttgccgatagcacgcatggtgtcatcaattgccgtgatcaacagcatttgcgggtctttagcgcaaacctgattcagtttttctaccactttggcgctcagttccggagattgctcaatttttaaatcacggctggcaacgctggcattacccatcaccgcaacaatttctgcaacctgtgcgctgtcagtttttgccatttcgttggcttctgcgcaagtaatataggtttctgacggcaaaccgtttttaatattgtagtcctgcgcccaggtcattggtgcgaaaacaaacaggcccgccagtaaagcaaattttttcatcatcattccttatttcattttacccagaattgcaccacccgtaccgccaatcacggcacctttaatcgccccttcgaggccattgccggtcagaacgccagtgacagcaccaacggcggcacccacttttgcacctttacgtgcatttttaccgtcgcggcctttttctgttactgcaccaacaccagcgccaacagctgcacctttcagtacgccattaacaccattgccagtaagtaatccaacgcctgcgcctagcaatgcacctttcgtggtgcggttcatatccgccatcgctggcgtggagcagaacaatgctgagataagcccgaaggcaagtatttttttcttcaacttagatgtccggtattaagtaagttgcacacacaataatttcgtcttcaattaagatctgcttaactaaagaacgctcgctattattcagataattcaaaatgagcgtggctgtgatgataggaattatgttttttacgtgaatgagaataatcttaaatgaggaataactcattgattggcaatatttttattcaagaagtatcattgactgttaacgcaatgttgtaaaggtaagataatctgatttatcaatattattgtgtgatttttatgtgagcagaagatattcatcagcaacgattacattagtcattttattttgccgacggcctcattgtcgaaagataagcgtacgacagtattatctgaaaagagtgattttttatccaactacacttcagcgcactgcgtttaaaaaatgcctctttcttatgcgggatatcatcatttcatcatgatgtctttggtgagcggtgaacacaatacacctgcgctgtctcttcaggatgaatcccctggtctggtgcctgcgggctgatgttgcagcagagcttaggtcacttagacgctactatcatttatccaatggcatggaatcgaaatcagtcgatacccgcagtatatatcgtgaactggtcgttctgaccatcaacgattaaactgcgcttcggcgcagttttcgtttacagggggctaaaagggaaaattctggggcaaaaaaagcccgccagttacggcgggaaacctcatcctatgggagaacaatgaataatgaaattgcggggttatcatcccccagtgtatccacactaacaataaggttatttactcagccaggcataaacattatgttctgtgcgtgggaacagccttaaggtgtaaagggggaggtggaaatagcaatgaggagtatcagcaagaatactcgccgctttaccacaacgtggatgagagggatgaaaaactcaaggcagaaatgactctgccttgaagataaatgcgtttttacagcgggcttatttcagctcttctgcttccggtaaggtcacgttcagctcaagaatagaaatatcgccatctttttgctcaagctgtacggttaccatctcaggatcaatttgtacgtatttacaaatgacctcaagaatatctttacgcaactgcggcagataatgcggttctgcatcgctgcgacggcgttcagcaacaataatctgcagccgttcttttgcaatgttggctgtgtttttcttccgcgagagaaagaaatcgagtaatgccataacttatcctccgaacaagcgtttgaggaagcctttcttctcttcttcaatgaagcggaaaggacgttcttctcccaacagacgttctacggtatctgcgtaggctttacccgcatcggcgttaatgtcgagaatgaccggttcaccttggttagaggcgcgcaatactgattgatcctctgggatcacgccgacgagtttgatgcgcaggatctccagcacatcttccatgctcagcatgtcacctctgcttacgcggcctgggttatagcgcgttaacagcaggtgctctttaataggctcttcgccattttctgcgcggcgtgatttcgacgccagaatgcctaaaatacggtcagagtcgcgtactgaggagacttccgggttggtggtaataatggcttcgtctgcaaaatagagtgccattaacgcaccggtttcaatccctgccggggagtcacaaacgataaattcaaaatccatcgctttcagatcatcaagaactttggcgaccccttcacgggtgagggcatctttatcgcgtgtttgcgatgccggaagaatatagagattttcagtacgcttatctttaattaacgcctgatttagcgttgcatcgccctgaatgacgttgacgaaatcgtaaacgacccggcgttcgcaacccataatcaggtcgagattacgcaggccgatatcaaaatctatcacgacagttttctttcccttctgggccaaaccagtggcgatggccgcgctggaggttgtcttaccaaccccccctttgcccgaagtaacaacaataatgcgtgccatagaaattccttgttaaaaagggatcaatttaacggttgaacggtcaaagcgttttcgactaactgcagtcgcgccgctttgccataaaattctgctgggatttgatcactcagccagtattcacctgcgatggacaccaattccgccatcaggttcgtacaaaatatttgcgtttcccggtcaccacttgcccctgccagcgcacgaccgcgcatcatgccatagacatgaatgttcccatcggcaatcaattcggccccagcgctaacgtggcttgtaacaatcagatcacattgtggagcataaatacgctgaccggaacgcaccggggtatctattaaacgcgtttttgtgaccggcgtggtattttgcgctggagcctgtggtgcgggagctggacgtggcgctttttcctttccttccgtcaggataggcagccccattttttcaatttcggctttaagttgcgcgtctttgcagccacttacgccaataacccgcaaaccggttgccgaaaccgccttatgcatcgctgaccagtttaccgggtcttccagtgcactgacgttgagtacaacgggggcatgttttaaaaatgcgggggcctgagcgattttgtcttccagcgcctgatggataaccttaggttctgcctcatgcagatgaaccacagataaagtgaagctactgcctttaagctcgattggcgtgtttgacatcctggccttactcaattagctattaatcatcgccagcgcgcgatgatgttccgaagactataaggcatgttatagtctggattatattgaggcaagtcaccctcccatttattcagagtaaaagtctattctgtgataaatggcgctgattcatagcttaaaaaatacccttgtcaatcaacccattgccgccgtacttttgattcttcttatttacgcttcctttttccgcaccctaatcgtgacagcatctccagacctgtttaaatatccagcattgaggcaagtgtattttttcaccacgccaggctttcttaactttccattttttgcagcatcattaaagaacagatacccgttatcttaatatccgccacagaattgctctatcatagaaaccgcagaagacgtctgatacttctgtcaggtcatcgtaactcgtccaggtcagcggttttgattacggattgatgacgaaatgagcataagtgttgtacggttggattatcaggatgtgctatgaatatgatgcgtattatttatatcggattgtcaggtgtggggatgatgttctcatcaatggcgtctggacatgacgctggcggacttcaatctccggcgtgcggcgttgtttgcgacccgtatatttgtgtgaactcagatggcatttccccagagttaacaaggaaatatctcggcgaaaaagccgctgaaaacttacaatcattacaaggctacgatcccagcgaatttacattcgctaacggtgtattttgcgatgttaaagaaaaattatgtcgtgatgatcgttattttggtgtagatggtaagcggagtggaaaaatcaatcaaaccaccacaaagatgttatttatgtgtcgtgagtgatgccttgtttacattatgttctctgctattcgtcattaacctcttgagcgacagagaggagtggggcgttaacgtctatgatggggatagtccccgtcggttgacatttacttaatttgaatatcgacgttatattttttagttttgtttttacgggcgtcgtttcgagtttgcagcactcgcagctcatatttgccagaagcagggagtgagtattgtccgtgactatcgagttctggggaatatctggataaatcaacagaatcatcgattcctggcccgaagagataagtatcagcgccttcattagagatactcacatgcactttctgaccttttttggcatagaaggtatatgtatcgtaatcgtatccctttatttcgccggagtactgagcgctgctatggcctttgctgaactcaacattgacatttttacccgcagcaaagctcgtggaggttagcagtgcaagcagcaatacagccttactgatgctcttgattttcattggtagtctcctgttcagaatgagtacgatgaactgttataatataacaatcccttacgggagaattccagtggcttttctgcgttcggtaaaatcccggcgcggcattttttgccggggggattacttataaaggggcatggactcaacaaaccgcagaaatctacagctggttggcttgtggcgcgggtttcattgatgttagcttatgccaaaacttggcatcttaaagagtaaaagtatgttttgtgtgatttatcgaagcagcaagcgtgaccagacctatttatatgtcgaaaaaaaagacgatttttcgcgtgttcctgaggaactgatgaaaggttttggtcagcctcagttagcgatgattctgccgttggatgggcggaagaaactggtcaatgctgatattgaaaaggttaaactggcattaaccgagcaaggttactatttgcagttaccgccaccacctgaagatttgctgaagcaacatctttccgtcatggggcagaaaacagacgacactaacaaataaccgatatccggcggtggcattatctttgtcggcgcgggttttcatatccacgataaggtgaggggaacgttatgtatcaacatcacaactggcaaggtgcgctgctggattatccggtgagtaaagtagtctgtgttggcagtaactatgccaaacatattaaagagatgggcagcgcagtgcccgaagagccagtgctgtttattaaaccagaaacggcactgtgcgatctgcggcagccattggcgatcccatccgatttcggttcagttcatcatgaagtcgaactggcggtgttgattggcgcgacgctgcgtcaggcaacggaagagcatgtccgcaaagccattgccggttacggcgtggcgcttgatctgacattgcgtgatgttcagggaaaaatgaagaaagccgggcagccgtgggaaaaggctaaagcgtttgataactcttgtccgctttccgggtttatccccgcggcggaatttaccggcgatccacaaaatacaacgctgggcctgagcgtaaacggcgaacaacgccagcaaggtacgactgcggacatgatccataaaatcgttccgttgatcgcttatatgagcaagttttttaccctcaaggccggtgacgttgtgttgacaggcacgcctgatggcgtcggcccgttgcaaagcggtgatgagctgacagtcactttcgatgggcattctttgacaactcgcgttttgtaatactttttgccgcctgaaagcggcggcaaaacttgcatcgctgtgccagactggttataaggtgcgttttaacgtaatggcggaacacctgatgagcgatgtacctttctggcaaagtaaaaccctggacgaaatgagcgatgcggaatgggagtcgttgtgtgatggttgcggtcagtgttgcctgcataaactgatggatgaagacaccgacgaaatctacttcactaacgtcgcctgtcgccagctcaatattaaaacttgtcaatgtcggaactacgaacgtcgtttcgagtttgaacccgactgcattaaattaacccgtgaaaatctgccaacattcgaatggctgccaatgatctgcgcttatcgtttgctggcggaaggtaaagatttacctgcgtggcatccgctacttactggttcgaaagcggcaatgcatggtgaacgtatctctgtgcgtcatatcgcagtgaaagaatcagaagtgattgactggcaggatcatatcttaaataaacctgactgggcgcagtgataaatttaatagatgttgatgggggctttcttaatatacgtctggatgctcgccatttcgtagccctgtttttgaaagcgctctgtcataatgagagttacccgataccttattatcaacaggtaactctcaatctttaaaaaacgtctgtgtttttaaatgtgataaaccttataccttgagtacatggagagaataatcgctgatcagacttcaggtacctcaaagagtgtctttttaccgtgttttttctgatactcattacaggtgttaatcatttttttggccgcttcttttagcaaagaaagcattaaatcatcataatcaacgtagaatctggtggtttcagtttccgtttttatctctccgatggcggctatttcggtggttaatttcaatttggcggcatcgatatctttattcgcttgtttaaccgtgttagacagggtggtaaagaaactctgcacagattttaacttgttcttcaattctgggatcagtttcccttcaactacgcccgcagcaatagaataggaaatgattaaaccaaatggaccggcgacgacaccggctgcggcaccggcatacgcttccttcctgattttatctacctgtgactggaaatagctgcttttttctgaaaaatcattggttaactggctatctaacgccagcagtttcccggaagcgttgttgaaactttgtgagcttaccagcagggatttttgcgcttcattcagcttcgtgatgccgtcatccagtaccttaatgagaatgtctttctgggcggatgctttcttctcattgtactcatcaaatagcaaaatatacgcagcgagcaattgcgtcgcaacaccacaccattcatacactgtttgggttgcttcaaaatacttatcctggctatccataagtaaggttttaatatcgccgactaaaacggaggctgcctgtgaatactcctgtttaaagcgacttaactcttttatggtttcatcaaaggtctgccaggggatgacctgatcgagatatttattataaagatctaatgctccatctgcggtttcgattgcgtttttaactacttctaccgttttatctgcaacgatttcagtcataatcattcgcctctttaaatatataaattgtaatgaaactcctgttttacaactattaataaattttacttcatctaattcatagttagccgggcgggatgcgtcaatgtctttatttctattaatatgataaatatcaaacaatgtttaatgtcattatggcgaatgcttctattctatttttttgccgggtgatatttttcatttctgctggatgagcgtcgtcgccagaaggccacgtgagcacaggataagagaacgaaaaatcagcagtctatgcagcgacaaatattgatagcctgaatcagtattgatctgctggcaagaacagattactgtatataaaaacagtataacttcaggcagattattatgttgtttatcaagcctgcggatctccgcgaaattgtgacttttccgctatttagcgatcttgttcagtgtggctttccttcaccggcagcagattacgtcgaacagcgcatcgatctgaatcaactgttgatccagcatcccagcgcgacttacttcgtcaaagcaagtggtgattctatgattgatggtggaattagtgacggtgatttactgattgtcgatagcgctattaccgccagccatggtgatattgtcatcgctgctgttgacggcgagtttacggtgaaaaaattgcaactacgcccgacggtacagcttattcccatgaacagtgcgtactcgcccattaccatcagtagcgaagatacgctggatgtctttggtgtggtgatccacgtcgttaaggcgatgcgctgatgtttgctctctgtgatgtaaacgcgttttatgccagctgtgagacggtgtttcgccctgatttatggggtaaaccggtggttgtgctatcgaataatgacggttgcgttatcgcccgaaacgctgaggcaaaggcgctgggtgttaaaatgggcgatccctggttcaaacaaaaagatctgtttcgtcgctgtggtgtggtttgctttagcagcaattatgagctttacgcagacatgagcaatcgggtgatgtcgacgctggaagaactatcgccccgcgtcgagatttacagtattgatgaggcattctgcgatctgacaggtgtgcgtaattgtcgcgatctgactgattttggcagagaaattcgcgcaacggtgctacaacgtacccatcttactgttggtatggggatcgcccagaccaaaacgctggctaagcttgccaatcatgcggcaaaaaaatggcagcggcagacggggggtgcccctattaagttgtcaagcatgttatgacccctgcggggtataaaaagtcccgtcgcgcatcatggcgaacagaacgtcgcagcgtcgtctcgccagggcgataagcgcctgattgtgtcgttttccctgactcattttgcgggtgtagtaagccctggagagcggatccctgagcgcggcgaaggccgacaggaacaacgcccgtttgagagctttattaccccgtcgcgagggatgctcaccgcgtattgacgagccggatcgccgagttaccggcgcaaggccagcataagcagcgagatgtgcggcagaggcgaaggcgcggcaggcgacctcggtgaggagtctggctgcggtcctgacaccgactccgggcatactggtcaggaccgggtaaagagggtgagcaagaactcgctgttctacctcaagcgccacctcgtctctttgcttacgcagcgtgatgagctggagtgccagacgtggcagtactacggcagcggcattcgtgccgggaacgacgacggtttgttcggccagtgcctgagctatgtctgctgcaaggcgtttacccagacgaggcgcaagtttgcagagctgggctgccagcttcttctcacccagcgaagcccagcgaagcgagtttttctggtgagggatatcgctggagaagatcgagtaccgccgggtgctcaagtctcggaccgagaacgcgctccagtgccggatgtatctgggtcagaaggccgcggatacggttgctggcctgcgttgtctgtgcggcaagatcatcatcgaagccgcagagcatggagagttcggcgatttgctcgtcagccagtttcagcgtgcgtagcgcgtgaggcagggtacgggcagcttcggcaatgatggcagcgtcacgagcatcagttttagcttcaccggcgtgtaagtcggctatgcggcgcatggccagtccagggaggtatccgacaaggactccttctgagcgggcaacggcgacaggtaacgcaccgatggtagctggctgatcaacaaccagcagtatctgaccatgttgtttcaggtcagatattagcgacctgagtttgttttcgtcgttgggtaatgctttatcgaacaggcgtttacctgaacgattaatggcaacagcgtgatgcgtatctttaccgacatcaacgccgataaagacctggacggattcgtaatcgctggattcggtcattctgtctcccttgtatatgggttaaccagataaccacggggagcaggtaccggcatccacgttacagacggtcccggcaaaagtgcctgacctgacccctattagcggttaccagcgccccaccagacccggtgacatcaccccccggatcatggacgactgggggcagtaatcatgccgggtctggctggctaacaccccattataaggggtacgaataaagtaacgggtggtggatttatcaaatctggaacgccagcgtaaattaatgtctgctctccccgtggatgacgtctgggggattggacggcggatcagcaaaaaactggacgcgatggggatcaaaaccgttcttgatttggcggatacagatatccggtttatccgtaaacattttaatgtcgtgctcgaaagaacggtgcgtgaactgcgcggtgaaccctgtttgcaactggaagaatttgcaccgacaaagcaggaaattatctgttcccgctcgtttggtgaacgtatcacggattatacgtcgatgcggcaggccatttgtagttacgctgcccgggcggcggaaaaacttcgcagtgagcatcaatattgtcggtttatctccacatttattaagacgtcaccatttgcgctcaatgaaccttattacggcaatagcgcgtcggtaaaactgctgacgcccactcaggacagcagggatatcattaacgccgctacgcgatctctggatgccatctggcaagcgggccatcgctaccaaaaagcgggcgtgatgctgggggatttcttcagtcagggagtcgcgcagctcaatttattcgatgacaacgcaccgcgccccgggagtgagcaattgatgacggtaatggatacactgaatgctaaagagggcagaggaacactctattttgccgggcaggggatccaacaacaatggcagatgaagcgagccatgctttcaccacgttatacaacgcgaagttctgatttactgcgggtcaaataaatatagcggcaggaaaaaagcgctcccgcaggagcgccgaatggattagcgaccgaacagatcacgttttttcgctttaaacggctgggaaatcatcaccagcaccgcgacaatcaggtaagcgataaaaataccgagcagccactgcggcatttccagacctaaaaaatcccactgacgctcggcgcaatcgccagaggcgacaaacacttgcggcacccatttatccagcggcagccattccgggaaacgaaccataaaatcacaggtggcaaacggcgaaggatagagctgaagcatggtgtgctcgtaagttaactgcacaccgcggaacgcactatacaaccagataaccatcgctacataacgcagcggagttttcggggcgatcgcgccaatcagcgcagcacccagaacgccgaataacgcgcagcgttcataaatacagagcacgcaaggtttcagtaacatcacatgctggaaccacagcgccgtcagttccagtgccagagcagtaaacgccatcaacagccacgcgccccggccttgtgaacattggttcaaaaatcgcaacataatcatttccctgcaatatgcatagagtgcgcagtttaaaccaattcattcgctgcgccaccaggaggcagcaaaaataggacgcaattggacaattatcgggcgaaaaggcaaaccgggcatttatatgcccggtaagttgttatcaaagcgttgctatccagcccatttgcataaaccattcggttacaggggcaagcgtaaactcgacgcagagcagtccgacgagtgtcaggacgagggtgtaaggcagggccatccacaccatgcggccataagagaggcgaatcaatggcgcgagtgcagaggtcagcaggaataggaacgcagcctgaccgttcggcgtagcgacagagggcagattggtaccggtattaatggcgaccgccagcagctcgtattgcttcaacgtgatagcgccactttccattgccgctttcgcttcgttgatataaatcgtccccacgaagacgttatccgaaatggatgacagcagaccgttgaatatatagaacagcgacagctgagcatgttccgatgcctgcaacacaaactgaataatcggcgaaaacagttgttggtcgataatcaccgcgactaccgagaaaaacaccgtcaacagtgcggtgaatggcagagattcggtgaaggctttaccgatagcatgctcatcggtgacaccgatcaatgatgtcgccagaataatgactgacaaaccaatcaaaccaacttccgccagatgcaacgccagcgcagtcaccaaccagacgccaataatcgcctggacaatcagacggattttatcctgacgggtacgctggtggcggctttgatcgtcaaactgctgcagcacttcgcggactttctccggcagcgtttcaccgtagccaaaccaacgcagcttctccaccagcaggcaggttaacaggccacaaatcagaaccggaacggtcaccggcgacatgcgcaggaagaaatcgccaaaatgccagccagccgctttagcgatgatcaggttctgtggttcgcccaccatggtcatcacgccgcctaatgcggtgccgacaccggcatgcatcatcaggctacgcagaaagccacggaactgttccagaaccactttgtaatgcttgtcgatatgactatcgtcttgcaggtcggtatcttcagtacgggaagaggctacgcggtgataaataccataaaaaccgactgcaacgctgatcaccaccgccacgacggttaaggcatcgaggaacgcggagaggaacgccgccgccacgcaaaaagagagcgacagcagcattttggagcgaatgcttaacagcaaacgggtaaatatgaacagcaatagctgtttcataaaatagatacccgccaccataaacatcagtaacagcaagacttcaagatttgccgccacctcttcacggacgtgttccgcgctggtcatgccgatgaataccgcttcgatagccaacagaccaccggggagcagcgggtagcatttcagggccatcgccagagtgaaaataaattccgctaccagcaaccagcccgcgacgaaagggctgatgaggaaaattaacgggtttacgattaagaaaatgatgagggcgagtttgtaccagtcgggggactggcccaaaaaattgcgccatagcgcgcggccccaggagatctccatgatggtttcccttaccttacaaataatcaatgatgtttttatgtttaaacgcaaagcttaacggtcaggcaggagtgaggcaagtcttgatagtcaaggggaaagagatgcggaaaatgaagccttgatccctttttcttctttttgtctgctatcagcgtagttagccctctggtatgatgagtccaactttgttttgctgtgttatggaaatctcactatggtcattaaggcgcaaagcccggcgggtttcgcggaagagtacattattgaaagtatctggaataaccgcttccctcccgggactattttgcccgcagaacgtgaactttcagaattaattggcgtaacgcgtactacgttacgtgaagtgttacagcgtctggcacgagatggctggttgaccattcaacatggcaagccgacgaaggtgaataatttctgggaaacttccggtttaaatatccttgaaacactggcgcgactggatcacgaaagtgtgccgcagcttattgataatttgctgtcggtgcgtaccaatatttccactatttttattcgcaccgcgtttcgtcagcatcccgataaagcgcaggaagtgctggctaccgctaatgaagtggccgatcacgccgatgcctttgccgagctggattacaacatattccgcggcctggcgtttgcttccggcaacccgatttacggtctgatccttaacgggatgaaagggctgtatacgcgcattggtcgtcactatttcgccaatccggaagcgcgcagtctggcgctgggcttctaccacaaactgtcggcgttgtgcagtgaaggcgcgcacgatcaggtgtacgaaacagtgcgtcgctatgggcatgagagtggtgagatttggcaccggatgcagaaaaatctgccgggtgatttagccattcaggggcgataatcccttccgtttaaagagcaaacccctcaaacgaggggttttttgttgtttttacagatttcccattcttggcgggcaacgttccagcaactcgatgctgccgtcttcgttttgctgttcgagcatcacatcaaatccccacaggcgatgcacatgcttcaggacttctttgcgcccccgatccagcggtgcgcgattatgtggaatataacgcagcgtcagcgaacggtcgccgcgcaaatccacgttccagatctgaatattcggctccagattacttaagttatattgcgacgataaccggttacgcatctcccgataaccttcttcattatgaatagcggaaatctccagataattatgccgatcatcatccagcacggtgaagaagcggaaatcacgcatcactttcggtgacagaaactggctgataaaactttcatctttgaaatcacgcatcgcgaaatgcagcgtttccagccagtcggaaccggcgatatccgggaaccagtatttgtcttcttccgttggcgactgacaaatccgtttaatatcctggaacatggcgaacccgagggcatacgggttgatgccgctgtaccacgggctgttataggggggctggaagaccacattggtgtggctgtgcaaaaactccagcataaaacgttccgttactttcccttcatcatacagatggttaaggatggtgtagtgccagaaggtcgcccagccttcgttcatcacctgagtctgtttttgcggataaaaatactggctcaccttacgcacaatacgcaggatttcacgctgccatgattccagcagtggcgcatttttctccataaaatagagcaggttttcttgtggttcggacggatagcggcgcgcttcagcaaccgttttctcttcctcgcgcttcggcagagtacgccagagcatattgacctgactttgcagatactcttcgcgacttttctgccgggctttctcttcttgcagcgagattttttgcgggcgtttgtaccggtccacgccgtagttcatcagcgcgtggcacgagtccagaagccgttctacttcatccacgccataacgttcttcgcactcggtaatatatttacgggcaaaaatcagataatcgacaatcgaactggcgtcggtccaactgcggaataagtaattgtttttaaagaaagagttatgcccatagcaggcgtgtgccatcaccagcgcttgcatggtaatggtgttctcttccatcaggtaagcgatacacgggttagagttaatgacgatttcataggccagcccttgctgaccgtgcttatacagccgttcagtctcgataaattttttaccgaatgaccagtgcggatagttaattggcatgccgacgctggagtaggcatccatcatctgttctgaggttatcacttcaatctggtgcgggtaggtatccagccggtagagtttcgccacccggtctatctctgccagataaacatccagcaggtcgaacgtccagtcgggtccatcgctcaaacgtgtggtgtccttattcatagaatcgatcgtcgccatacgcgcacctcattgttgtcggcgctctctgtgtggagcacctcatttcaagcatagaacacctgttaaaaaccgcgtcgccggagaatttttttctttgcgatttcttattatcagagtgccactaatccgcttctgaacggaattttatgctggataaaaagggcgttcagcaggagatactaaagacgccatattgccgcagagtcagggagatgtgagccagctcaccataaaaaagccgtatgttgaataatgttttcaactgagttatcaagatgtaattagattattattcttttactgtatctaccgttatcggagtggctatgcgagttgtcatactgggaagtggtgtggtaggcgttgccagcgcctggtacttaaatcaggcaggacatgaggtcaccgtcattgatcgggagccgggggccgccctggaaaccagcgccgcgaatgccgggcaaatctcccccggatatgctgcaccgtgggcggcaccaggtgtgcctttaaaagcgatcaaatggatgttccagcgccatgcgccgctggcggttcgtctcgacggtacgcagtttcagttgaaatggatgtggcaaatgttacgtaactgcgacaccagccactacatggaaaacaaagggcggatggtgcgtctggcggaatacagccgtgattgcctgaaagcattgcgcgccgaaaccaatattcagtatgaagggcgtcagggtgggacgctgcaactgttccgtaccgaacaacagtatgaaaatgcgacccgcgatatcgccgtgctggaagatgccggcgtaccgtatcagctgctggaatccagccgcctggcggaagtggagcccgcgctggcagaagtagcgcacaaactgacgggtggtctgcaactgcccaatgatgaaaccggagactgccagctgtttacccagaatctggcgcggatggcagagcaggcgggggttaaattccgctttaatacgcccgttgaccaactgctttgcgacggcgagcaaatctacggcgtgaagtgtggcgatgaagtgattaaggccgatgcgtatgtgatggcgtttggttcttactcgacggcgatgctcaaaggcattgttgatattccggtgtatccgctgaaaggctactcgctgactattccaattgcgcaggaagatggtgcgccagtatccaccattcttgatgaaacctacaaaatcgccattacccgtttcgataaccgcattcgtgttggcggaatggcggaaattgttggttttaacaccgagctgttgcaaccgcgtcgtgaaacgctggaaatggtggttcgcgatctctatccacgcggcggtcatgtcgagcaggcgactttctggacggggttgcgcccgatgacgccagacggtacgccggttgtcgggcgtacacgctttaaaaatctgtggctgaataccggtcacggcacgctcggctggacgatggcttgcggttccggtcagttgttaagcgatctgctctctggtcgcacgccagcgatcccatatgaggatctaagcgtagcgcgctacagccgtggatttacgccatcacgtccgggccatttacatggcgcacacagctaaggaaacgagatgacccgtccgatacaggccagcctcgatctgcaggcattaaaacagaatctgtccattgtccgccaggccgcgccgcacgcgcgcgtctggtcggtggtaaaagcgaacgcttacgggcatggtattgagcgtatctggagcgcgctcggggccaccgatggctttgcattacttaacctggaagaggcaataacgttacgtgagcgcggctggaaggggccgatcctgatgctggaaggatttttccatgctcaggatctggagatttatgaccagcaccgcctgaccacctgcgtacacagcaactggcagctcaaagcactgcaaaatgcgcggctaaaagcaccgttggatatttatcttaaagtgaacagtgggatgaatcggttgggcttccagcccgatcgcgtgcttaccgtctggcagcagttgcgggcaatggcgaatgttggcgagatgaccctgatgtcgcattttgccgaagcggaacatcctgatggaatttccagcgcgatggcgcgtattgagcaggcggcggaagggctggagtgtcggcgttcgttgtccaattcggcggcgactctgtggcacccggaagcgcattttgactgggttcggcctggcattattttgtatggcgcttcgccgtccggtcagtggcgtgatatcgccaataccggattacgtccggtgatgacgctaagcagtgagattattggtgtccagacgctaaaagcgggtgagcgtgtgggctacggcggtcgctatactgcgcgcgatgaacagcgaatcggcattgtcgccgcagggtacgccgacggttatccgcgccacgcgcctaccggtacccctgttttagtggacggcgtgcgcaccatgacggtggggaccgtctcgatggatatgctagcggtcgatttaacgccttgcccgcaggcgggtattggtacgccggttgagctgtggggcaaggagatcaaaattgatgatgtcgccgccgctgccggaacggtgggctatgagttgatgtgcgcgctggtgctacgcgtcccggttgtgacggtgtaacttgttgtaagccggatcggaggcaacgtcttctgggtgcaaaaaaaatcatccatccggctggtcagcaactgtagttgttaatgtgacagagccattgcccatgatagtgtccattaaaaggatggacactatttccccggaacctgaactcaccgcacaggcgttctacataaaacgcttacgcttcattgttgactcgaactcgacttcagataaatcacgctttacccttgatggagcctgtacatagatttgtgtaattgcctgattttgatatgttcaattcaacatcaaatgaaggttaaattatggacgacaaacaattgcaggctcaggctgcgttcagcaaagcatcgcaaccggcgatagatgcttcattaaatttaagattcagcttcctcttcagccacccgtacgccaatcttcaacacttcattatcttctttctcggccaccgtccagatcatcccggcaaactctacctggtcaccgacaaccggtgccgcgcctaacaactgctggacaatttcacccagcgtttgctgcttatcacgatattctcgcccgtcttccaggccatatatcagcgcaacatcagcatatttggcgctggcttcgagaatgaagtcaccaaagaagcgttgatccagcgcgaccggtggcgactggctgaacagtttaccgagcgccgggagatcgcgttcccgaccaattacacacaacacatcgccttcgcgcagtcgggtgctgccggtaggatgaagcaactggttatcacgaaatagtgccgcaatacgcgtctcttttggcatatgcagatcgcgcagtgccgcacctacacaccatttatcggcactcaattgataaacaaactgctcccacggattttccggatgaatatccagaccaacgcgtgacactggacgtccgacgggcggaaccaccactttggcttttttcgccgcccacgagagtgatgttccctgcaagagcagtgaaaccagaaccacaaagaaggcgacattaaagaacagacgtgcattctccagccccgccatcatcgggaacacggccaggatgattggcaccgcgccgcgtaatcctacccagctgataaacacgcgctcacgcagattgaaaccgcggaaggggagcaatccagcaaataccgaaaggggacgggcgaagaatatcatccatgccgacaaaatgagcgccggaatggcaataggcagcagatcgcttgggttaaccaatagccccagcaccaggaacatggcgatttgcgccagccaggcgaggccgtcgaaattttgcaggatgccgtagcggttgcgaatcggccgattacccagcagaaaaccgcacagataaacagccagaataccgctgccttccagcgccgtggttaaagcaaaaattaaaataccgccgcttaatgccagcaatggatataatccggcaggcagggcgatgcgattaatcatttgcagcagtaaataaccaccgccaagtccgatgacaatcccgaggccaaattgctgcagaatatcgaccacgaacatccaactgacactgctttcatgttgctggatcatcgcaatcagggtaatcgtcagaaagaccgccattggatcattactgccggattcaatttccagcgtcgagccaacacgttcgttaagccccttaccacccagcagagaaaagaccgctgcagcatcggtagagccgacgatagcgccgattaataagccttcaatcaaatcaagattaaacagccacgccgccatcatgccggttaaaccagaggtgataagcacgcccagcgtcgccagcgacagtgccggtcctaacgccacacgaaaggaactggcctgagtgcgcatcccgccgtcgagcaaaataatcgccagtgccaggttacttaccatgtaggcgaaggggtaattatcaaacgggataccgccgacgccatcgactcctgccagcatgccgatcgccagaaaaataaccagaataggaatgccaagacgggaagaaaatgaactaagtaatatactgctggtgacaaggatggatcctaagatgaaaaggctaattattgttgtggcatccaacggtcggttactcctgattacgctgtctcttatataaaccctaccatattagcggcagagacagcgttttacttagccctgaagcgtgatttttttacattttaagaacaggatgaccgctaatcgtcaactgagtgccttcccgggtgttattcagaatggcatgtgcgcccaacggcagcgtaaccgtgcgttgttcatgaccaaaatcgaggccggtaatgagtggaatcgacaggcgggaacgcaaaaacgcgtacactgactccaggttgtaacctgcgtcataatcattgggcgtgctgccgctaaagctaccgagaatgatcgccttctgacgtggcaaaattcccgcatgatagagctgcaacagcatacgttcgtcccggaaagggtgctcgttaatatcttccagcaccagaataccgttctcaatttttggcatccacggtgtaccgatcagtgaaatcagcatcgcaagattgcctccccacaacgtgccttcggcccgacatgtcgggccttccccttgccattcaatggtgaaggtttcattgcgtaacgccagccagaaatggtgctcggtaaaggcgttcagttcatccgcgccaaagtttgctaccagcatggggccgctaaaggtgatgacattgccatgcgccagaagaccgcactgaatggcggtaaaatcgctatgcccgcaaatgagcaacgggtcatgttgttggcgagccaccagtgcctgccagtcaatatctgccagtaaacgactggcaccgtaaccgccgcgtacagccagcacgatggtgttgggggtggtcagtctggcaagggaattgagatcttccaggcgctccgtttccgtacccgcaaaacgctcacaacgacgggcaataacctcgacgttattgacctgatgcccctcgtcggtaaggcgctggataccacgcagcgcggcgtgctgtttaatgcagtaacccgatggggcaattaagtgaaacagagacatggcaattccttgctgacaacagaaacgaaatgtatatcatgccgcttaggtgtgccgttgtcacctcaacggcgattccaggctataaggatagaagaagtgaaattgagatggtttgcctttttgattgtgttattagcgggttgttcatcaaagcatgactatacgaacccgccgtggaacgcgaaagttccggtgcaacgtgcgatgcagtggatgccaataagccagaaagccggtgcagcctggggcgtcgatccacaattgatcacggcgattatcgctatcgaatcgggtggtaatccgaatgcggtgagtaaatcgaatgccattggtttgatgcagttaaaagcttcaacctccggacgtgatgtttatcgccgtatgggctggagtggtgagccgacgaccagcgagctgaaaaatccggagcgtaatatttcaatgggggcggcttacctgaatattctggaaaccggcccgctggcaggcattgaagatccgaaggtactgcaatatgcgctggtggtgtcatacgctaacggggcaggtgcgctgctacggactttctcgtcagatcggaaaaaggcgatcagcaaaatcaacgatttggatgctgacgagttcctcgaacacgtagcgcgaaatcaccctgcgccgcaggctccgcgctatatctacaaacttgagcaggcactggacgcgatgtaaatcagtcgcgcactttgtccgctttttcccgggcttctcgctcgagagagaaaataatccgctgtaattgccgctccaccgtcgggctgacgttaagaaaacggaagctcagacggggagtggtgatggtttcattcttgccatcaatcactttgcgctcgctgatagagattaactgggcgtcaaagtgaaaaacaccccattgccccatgttgacttcaatctgagcgaagcgcatgccttcttgtaattcggcaggctttgctgtttccagtaatgcgcccatgccgcctaacgacaaatcatacaggcggaaacgtaacgtactgttatccgccagtttggtctggcaaaaataaggcggatggagtggggcggagatgcggaaatatcggcgtcgttgtacaaaccataaggtgggaggcggtacggtgataaatgccggaagctgcaagtattcactctgctgtagttgttcaacagtaaactcgactttcgcaccctgagtttcggcggtaatggtaatgtgctgtgcctttagcacagcgatgttgtcttcggcttgactgccgaaatccagcaccagtttatccggggttattgccagtattttgctgatcagctgcccgccattccaactgagacgcaaaggaattgcggctttgtgcaaatcgcgtaacacgcccaggacggctaacggattttgtttcaggaactgctcatggtaatgactcacgcggaaaaactcctgactgacaaactgtctttggtttatcggtcacagttaacaaaacttaatacaaatgcgtgaatattttttacatgttgttcttaaatcagccgacatacgcccagcatcgatcccgcccttgcctatacttagagcgttgacgtaagcatttcttgcgtccgattcatcgaaacgagggcctgaacatgggaattattgcttggattatttttggcctgatagccggcattatcgccaagctaatcatgccggggcgtgatggtggtggatttttcctgacctgtattctcgggatagtcggtgcggtggtcggcggctggctggcgaccatgtttggcattggcggctccatcagcggttttaatttgcacagcttcctggtggcggtggtgggtgaggtagcctgagtttaacggacactccttcctgaaatagaatggcatcagaaggagctaataatgagcagaaaaacccaacgttactctaaagagttcaaagccgaagctgtcagaacggttcttgaaaatcaactttcgatcagtgaaggcgcttcccgattatctcttcctgaaggcactttaggacaatgggttaccgccgccagaaaagggctcggtactcctggttcccgcacggtggctgaactggaatctgaaattctgcaactgcgtaaggcgttaaatgaagctcgccttgagcgagatatattaaaaaaagcaacagcgtattttgcacaggagtcgctgaaaaatacgcgttaatcgaacaatggcgacaacaatttcccattgaagcgatgtgtcaggtatttggtgtatccaggagcggttattacaactgggtacagcatgaaccctcagacagaaaacaaagtgatgagcggctaaaactggagattaaggtggcacatatccgcactcgcgaaacatatggaacccggcggctccagacggagctggcagagaatggcatcatcgttggtcgtgaccgactggcacgtcttcgtaaggagctaaggctacgctgtaagcagaaacgcaagttcagagcgactacgaactcgaaccacaatctgccagttgcgccaaatctgctgaaccagacgttcgctcctacagcaccaaatcaggtctgggtggcggacctgacgtatgttgccacacaggagggatggttgtacctcgctggcatcaaagatgtttatacgtgcgaaattgtcggctacgccatgggagagcgcatgacaaaagagctgacaggtaaagccctgtttatggcgctcaggagccagcgcccacctgccgggctaatccaccactctgatcgaggttcacagtactgcgcatacgattaccgggtcatacaggagcagtctggtctgaaaacatcaatgtcgcgtaaaggtaactgttacgacaacgctccgatggaaagcttctggggaacgctgaaaaatgagagcctgagccactatcgttttaataaccgggatgaagccatctcagtaatacgggaatacattgagattttctacaatcgtcagcgtcgtcactctcgtctggggaatatctccccggcagccttcagggaaaaatatcatcagatggctgcttaaaaaaagaacaaatggtagtgtccgctattgccagtacacctcagtcttcattgctactggtaacggtagtgcttttgaacagatcggctttatttaacgcagtatttgcagtctggaatttttctaatgcacatttttaatgtgccataggctgtcagacgtgcggtattgtcactctgttgctgagtaattgggtttaagcgttttttttcagcgatggtcaggttgtttagcaatgtatccagcggcagattcgaaccaacgccaagagatgtaaatgaagccatacctaattccttttgattgaaaacagtagataagcgggttatcggcaatttgtgcgcaaagtttaatagttgattcacgaagatgatgcgcagagtagagttgtatattacggatatttcagccgttaagaaaaaacaggagagaaactaaaattttctaaagttcgaaattcaggtgccgatacaaggggtacggtgagaaaccgtgggcaacagcccaataacatcaagttgtaattgataaggaaaagatcatggcacaagtcattaatacaaacagcctgtcgctgttgacccagaataacctgaacaaatctcagtcttctctgagctccgccattgaacgtctctcttctggcctgcgtattaacagtgctaaagatgacgcagcaggtcaggcgattgctaaccgttttacagcaaatattaaaggtctgactcaggcttcccgtaacgcgaatgatggtatttctgttgcgcagaccactgaaggtgcgctttctgaaatcaacaataacttacagcgtattcgtgaattgtcagtacaggccactaatggtacaaactctgactccgacctgaattcaattcaggatgaaattacacaacgccttagtgaaattgatcgtgtttctaaccagacacaatttaatggtgtaaaagttctggcttctgatcagactatgaaaattcaagtaggtgcgaacgatggtgaaaccattgagattgcccttgataaaattgatgctaaaaccttggggcttgataactttagcgtagcactaggaaaagttccaatgtcctctgcggttgcacttaagagcgaagccgctcctgacttaactaaggtaaatgcaactgatggtagtgtgggaggtgctaaagcattcggtagcaattataaaaatgctgatgttgaaacttattttggtaccggtaatgtacaagatacaaaggatacaactgatgcgaccggtactgcaggaacaaaagtttatcaagtacaggtggaagggcagacttattttgttggtcaagataataataccaacacgaacggttttacattattgaaacaaaactctacaggttatgaaaaagttcaggtgggtggtaaggatgttcagttagcaaactttggtggtcgtgtaactgcatttgttgaagataatggttctgccacatcagttgatttagctgcgggtaaaatgggtaaagcattagcttataatgatgcaccaatgtctgtttattttgggggaaaaaacctagatgtccaccaagtacaagatacccaagggaatcctgtacctaattcatttgctgctaaaacatcagacggcacctacattgcagtaaatgtagatgccgctacaggtaacacgtctgttattactgatcctaatggtaaggcagttgaatgggcagtaaaaaatgatggttctgcacaggcaattatgcgtgaagatgataaggtttatacagccaatatcacgaataagacggcaaccaaaggtgctgaactcagtgcctcagatttgaaagccttagcaaccacaaatccattatccaaattagacgaagctttggcaaaagttgataagttgcgcagttctttgggtgcagtacaaaaccgtttcgactctgccatcaccaaccttggcaacaccgtaaacgacctgtcttctgcccgtagccgtatagaagatgctgactacgcaaccgaagtgtctaacatgtctcgtgcgcagatcctgcaacaagcgggtacctctgttctggcacaggctaaccagaccacgcagaacgtactgtctctgctgcgttaatttacacttatcgctcaaaccccgccaccggcggggttttttctgtccgcaatttaccggtaacccctaaataacccctcatttcacccactaatcgtccgattaaaaaacctgcagaaacggataatcatgccgataactcatataacgcagggctgtttatcgtgaattcactctataccgctgaaggtgtaatggataaacactcgctgtggcagcgttatgtcccgctggtgcgtcacgaagcattgcgcctgcaggttcgactgcccgcgagcgtggaacttgacgatctgctacaggcgggcggcattgggttacttaatgccgtcgaacgctatgacgccctacaaggaacggcatttacaacttacgcagtgcagcgtatccgtggcgctatgctggatgaacttcgcagccgtgactgggtgccgcgcagcgtgcgacgcaacgcgcgtgaagtggcacaggcaatagggcaactggagcaggaacttggccgcaacgccacggaaactgaggtagcggaacgtttagggatcgatattgccgattatcgccaaatgttgctcgacaccaataacagccagctcttctcctacgatgagtggcgcgaagagcacggcgatagcatcgaactggttactgatgatcatcagcgagaaaacccgctacaacaactgctggacagtaatctgcgccagcgggtgatggaagccatcgaaacgttgccggagcgcgaaaaactggtattaaccctctattaccaggaagagctgaatctcaaagagattggcgcggtgctggaggtcggggaatcgcgggtcagtcagttacacagccaggccattaaacggttacgcactaaactgggtaagttataacgtcagtaaatgccgcactttaattttgactaccaggagttcttaatgatggtgcagcacctgaaaagacggccattaagccgctatcttaaagactttaaacacagccagactcattgcgcgcattgccgtaaattactcgaccgcattaccctcgttcgcgacggcaaaatagtgaataaaatcgagatttcccgcctggacatgctgcttgatgaaaatggctggcaagtggaacaaaaatcatgggcggcattgtgccgattttgtggtgatttacactgcaaaacgcagagtgattttttcgatattatcggctttaagcaatttctttttgagcaaactgaaatgagcccaggtacggtgcgtgggtgatgctgccaacttactgatttagtgtatgatggtgtttttgaggtgctccagtggcttctgtttctatcagctgtccctcctgttcagctactgacggggtggtgcgtaacggcaaaagcactgccggacatcagcgctatctctgctctcactgccgtaaaacatggcaactgcagttcacttacaccgcttctcaacccggtacgcaccagaaaatcattgatatggccatgaatggcgttggatgccgggcaactgcacgcattatgggcgttggcctcaacacgattttacgtcacttaaaaaactcaggccgcagtcggtaacctcgcgcatacagccgggcagtgacgtcatcgtctgcgcggaaatggacgaacagtggggctatgtcggggctaaatcgcgccagcgctggctgttttacgcgtatgacagtctccggaagacggttgttgcgcacgtattcggtgaacgcactatggcgacgctggggcgtcttatgagcctgctgtcaccctttgacgtggtgatatggatgacggatggctggccgctgtatgaatcccgcctgaagggaaagctgcacgtaatcagcaagcgatatacgcagcgaattgagcggcataacctgaatctgaggcagcacctggcacggctgggacggaagtcgctgtcgttctcaaaatcggtggagctgcatgacaaagtcatcgggcattatctgaacataaaacactatcaataagttggagtcattacccggtgcgtgaatatgtcgttcgtctgcgccgtttgggtaatcatctacacgagcaaaatatttccctcgatcagctgcaggacggtttccttgatgaaatcctcgccccgtggctgcccaccaccagcaccaacaattaccgcattgcgttacggaagtatcaacactatcagcgtcaaacgtgtacctgacttgtgcagaaatcctccagtctgcctgcttctgatatatattaaataagaataagatgtagcggagttgtttttgtgtttacaaacaatggctctacactgcaaacagacataacaacattcggggtgaatatgaaattagcacatctgggacgtcaggcattgatgggtgtgatggccgtggcgctggttgcgggtatgagcgttaaaagttttgcagatgaaggtctgcttaataaagtcaaagagcgcggcacgctgctggtagggctggaaggaacttatccgccgttcagttttcagggggatgacggcaaattaaccggttttgaagtggaatttgcccaacagctggcaaaacatcttggcgttgaggcgtcactaaaaccgaccaaatgggacggtatgctggcgtcgctggactctaaacgcattgatgtggtgattaaccaggtcaccatttctgacgagcgcaagaaaaaatacgatttttctaccccttacaccatttccggtattcaggcgctggtgaaaaaaggtaacgaaggcaccattaaaacagccgatgatctgaaaggcaaaaaagtgggtgtcggtctgggcaccaactatgaagagtggctgcggcagaatgttcagggtgtcgatgtgcgtacctatgatgatgacccgaccaaatatcaggatctgcgcgtaggccgtatcgatgcgatcctcgttgaccgtctggcggcgctggatctggtgaagaaaaccaacgatacgctggcagtaaccggtgaagcattttcccgtcaggagtctggcgtggcgctgcgtaaaggaaatgaagatctgctgaaagcagtgaatgatgcaattgcggaaatgcaaaaagatggcactctgcaagccctttccgaaaaatggtttggtgctgatgtgaccaaataatcagcataatgacaaaaaagggcgctttcactaaatagctgcgcttaataccgctacacttttgccagcccatgtttgcctccggggaatgggctgacggtttccataaaatggcgaacttttttcaacagttgccacattgagctgcactgatgattacgcgttattgtgtcgtgaagtgcctgccatagccgttcaacatgattcacccatggcgagtaaaccggctgataaatgaccctgaacttcgggttctccttcagccagctctgtgtttcccggcttttgtggataatgtagttgtccacgatcagcgtgatggttttcgcccgacggtatgtcgctttaagccgcttcagcaggctgatgaacagcgccgaacttttgctgttgccgcccacacagctgactttacctgtcccgctgtgcagcgctccggccagataatatttttcattctgtcccggcgtgaccacccgtttttgctgtccgcgcagttgccagtccgcaccgattttgggattaagatggatatccacttcatcttcataaaagaccggatgctctgcgctgcattcgtccagtgctttatggattgctgccatcttttcatctttatgcgggtcacggatacgcagagttggcgcagcccttcgccacacaatccccgcagacggcaaccagcggcgaacggttccggcatttaactggcaaccggttatctcattgatttttattgccagcagttctgtactccagcgtgaacgctggtagccaaagtcgccgggagaatgttttaccagctcacgtaacagtgtgcagatatgctcaaacggccagcgacgggcacgcccggcaggtaatgatttcagtccctcaacacccgactgcgtgaaccagttaatccagcgtccaacagaggaacgggcgcagcagagcgttctggcaacgtcgctgacacggtcgccccggtgcagcatcagcatggcagtcagtctgcgggcataatttttatcgtgtgttttatggatggctttctgcatcaggcgtcgttcgtcacgggaaattggtgctatgatcggcattgctcagtccggttggtgatttgttttgatttggcgattgatcagatcgcacaatccgggctaagttccctcaaagtgatctactattccgcgcagctatttagcgccttttttatttacgcgttttcagcgtgcataataagaaaatcacaacaacatacatcggaggctgttatgccactgcataatttaacccgttttccacggttggagtttatcggcgcgccaacgccgctcgaatatctgccgcgcttttctgattatctaggacgggaaattttcatcaaacgggatgacgtcacccccatggcaatgggcggcaataaattacgtaagctagaatttctcgcggcagatgctctgcgcgaaggtgccgatacgctgattactgccggggtgatccagtctaaccatgtgcggcagactgccgcagttgcggcgaaactcggtctgcactgtgtggcgctgctggaaaatcctattggcacaaccgcagaaaactatttaaccaacggcaatcgcttgttgctggatctgttcaatacccagattgaaatgtgcgaagcactgaccgatcccaatgcccaactggaagagctggcgacgcgagtcgaagcacaaggctttcgcccgtatgtcattccggttggcggttctaatgctcttggcgcgctaggttatgtggagagtgcgctggaaatcgcgcaacagtgtgaaggggcggttaatatttcgtcggtggtagtcgcatcgggcagtgccggaactcacgccggactggctgttgggctggaacacctgatgcctgaaagcgaactgattggcgtgaccgtgtcgcgttccgttgccgatcagttgccgaaagtggttaacctacaacaggcgattgcgaaagaactggagctgaccgcatcagcggaaattatactctgggatgactattttgcacctggctacggcgtgccgaacgacgaaggcatggaagcagtgaaattgctggcgcggctggaaggcattctgcttgatcctgtgtataccggaaaagcgatggcggggctgattggctgtatcagtcagaaacgcttcaaagatgaagggccgattctgtttattcataccggcggtgcgcctgcgctgttcgcctatcatccccacgtttagctccgggaacgctcatgcaagaaagtatacaactggttattgattccttgccgttcctgctgaaaggggctgggtatacgctgcaactcagtatcggcggcatgttttttggcttactgctcgggtttattctcgcgctgatgcgcctgtcgccaatctggcccgtgcgctggctggcgcgtttttatatctctatttttcgtggtacaccgctcatcgcacaactgtttatgatctattacggcctgccgcagtttggtatcgaattagatcccattccgtcagcaatgattggtctgtcgctgaacactgccgcctatgccgccgaaacactgcgcgccgccatttcttctattgataaaggtcagtgggaagcagctgccagtattggtatgacgccatggcagactatgcgtcgcgcgattttgccacaggcggcgcgggtggcgttgccgccgctgtcgaacagctttatcagcctggtaaaggatacgtcgctggccgcgacaatccaggtgccggagctgttccgtcaggcgcagttgattacctcgcgcacgctggaggtgttcaccatgtacctggcggcttcgctcatctactggatcatggcgacagtattatcgacgttgcagaaccattttgagaatcaacttaatcgccaggagagagaaccaaaatgagtgccattgaagttaagaacctggtgaaaaaatttcacggtcagacggtgctgcacggtatcgacctcgaggtaaagcctggcgaagtggtggcaattatcggtccgagtggttccggcaaaaccacgttgctacgcagcataaatctgctggaacaaccggaagcgggaacgatcaccgttggcgatatcactattgatactgcacgttcattaagtcagcaaaaatcgctgatccgccagttgcgtcagcacgtcgggtttgtcttccagaactttaatttgtttccgcatcgtacggtgctggaaaacattattgaagggccggtgatcgtcaaaggcgaaccgaaagaagaggccacggcgcgcgctcgcgagctgctggcgaaagttgggctggccggtaaagaaaccagctatccacgtcgtttgtctggcggtcaacagcagcgtgtagcgattgcgcgtgcgctggcaatgcgtcctgaggtgattttgtttgacgagccaacgtcagcgctggatccagagctggtgggcgaagtcctgaacacaatccgccagctggcgcaggaaaagcgcacgatggtgattgtgacgcacgaaatgagctttgcccgggatgttgcggaccgggcgatttttatggaccaggggcggatagtcgagcagggggcagcaaaagcgttatttgctgatccccagcagcctcgcacccgccagttcctcgagaagtttctgctgcaataataagaaaaaatcagccccgacgattcacctgtcggggcgggacgccatttcaagcgtgataaaactgcttaacaaatcagcataactcattaataacataagagaatgcgatggcttgcaaaagtaattcattgcctgaataatataaattatatataaatcttatttatgtgatagtttgaattatcattataaatgatactcactctcaggggcgttgcggtttactatgcaggatacggattttttcagctggcgtcgcacgatgctgttgcgttttcagaggatggaggccgcagaagaggtctaccatgaaatagagcttcaggctcagcagctggagtacgattactattcgttatgtgttcgccacccggtaccattcacgcgacctaaagtggctttctacaccaattaccctgagtcgtgggttagttattatcaggcaaaaaattttctcgcaattgatcctgtgctgaaccctgaaaactttagtcagggccatttaatgtggaatgatgacttattcagcgaagcacagccattatgggaagccgcgcacgcacatggtttacgccgcggtgtcactcagtatttaatgctgccaaatcgggcgctgggctttttgtccttttcccgttgcagcacgcgcgaaatacccattcttagtgatgaactgcaattaaaaatgcagttactggtgcgcgaaagtctgatggctctgatgcgtttaaatgatgaaatagtgatgacgccagagatgaatttcagcaagcgcgaaaaagaaattctgaaatggacggcggaagggaagacatcagcagagatagcgatgattttgtcaatctctgagaatacggtcaatttccatcagaaaaacatgcagaaaaaaatcaatgcaccaaataagacccaggtggcctgttacgcggccgctactggcttaatttgatcgcttttctttctgcgtgccagatgcaaaaatcggctgaaaggcacgctctcagccggttttatattactgacggtaggcttgtttaatttgcttaaccgttttggaaaatactgcagcctgggtttcgtcttcgatcagcgcaagctgtttttccatctttaacatcacgcggcccgcgtcagcttgtcccatcgcctgtagcatcagcgtcagcatcgctttcaggcaggagacttcatttgccagttcttgattattctcggcagtagaaaaatcaggcgtactcatttattttcctcgtcatgttgcaatgaaaatttgcggtgaaaaatgttaaggcggcggagtataccataagctttgctaaaaatagcagtggttgttttttgagcgtgacgtcaacaatgctattaaatgcgttaatataatgaccaataaatatttttatcatgaatgttttttgcccgtattgttcgggttaattaatgttacatattcagcgggctgattttcatttttgctgaataaagtcaatttttgtcacatttcatcgccgggcttactgtgaaacgatcccggaagccgttggtgacgggcgtgaccataactgtggacaatcgaatttacaaaaacgagagaaaaatcgaatacccaccatttttaacgtttcaaagttgcaataaaaaccgctaatatacgaatgactaactatcagtagcgttatccctatttctggagatattcctttgatcaacgttctacttgttgatgaccacgaactggtgcgcgcagggatacgacgcattctggaagatataaagggtataaaagtcgtcggtgaggcatcgtgcggtgaagacgccgttaagtggtgccggacaaatgccgttgacgtggtgctaatggacatgagtatgccgggcattggcggtcttgaggcgacgcgtaaaatcgcgcgttccacagctgatgtcaaaatcatcatgcttaccgtccatacagaaaaccctttaccagcgaaagtcatgcaggccggtgctgcgggctacctcagcaaaggcgcggctccgcaggaagtcgtgagtgcgattcgttctgtctattcagggcagcgttacattgcttctgatatcgctcaacaaatggcgttaagccagatcgaaccagaaaaaacagaaagcccatttgccagtttgtctgaacgtgaattgcagattatgctgatgatcaccaagggccagaaggtcaatgagatctcagaacagctcaatctcagtccgaaaacggtgaacagctaccgctatcgtatgttcagtaaactaaacattcatggcgatgttgagctgactcacctggcaattcgccatggtctgtgtaatgcggagacattatcaagtcagtgagtgatcagtttgacgcaaaagcgtttttaaaaaccgtaaccagccagccaggcgtttatcgcatgtacgatgctggtggtacggttatctatgtcggcaaagcgaaagacctgaaaaaacggctttccagctatttccgcagcaacctcgcttcgcgcaaaaccgaagcgctggtcgcccagatccagcaaattgatgtaacggttacgcatacagaaaccgaagcgctgttgctggaacacaactacatcaaactctatcagccgcgttacaacgttttgctacgcgatgataaatcttatccttttatcttcctgagtggcgatacccacccgcgtctggcgatgcatcgtggtgcgaagcatgccaaaggtgaatatttcggcccgttcccgaatggctatgccgtacgtgaaacactggcgctactgcaaaagattttccccattcgccagtgcgaaaatagtgtttatcgcaatcgctcgcgtccgtgtctgcaatatcagatagggcgctgtctgggaccgtgcgttgaaggactggtgagtgaagaagaatacgctcagcaggttgagtatgtgcgcctgtttttgtctggcaaagatgatcaggtgcttacgcaactcattagtcgtatggaaactgccagccagaatctggagtttgaagaagctgcacgtattcgcgaccaaattcaggcggtgcgacgcgtcaccgaaaaacaattcgtttccaataccggcgacgacctcgacgttattggtgtggcgttcgatgcgggcatggcttgtgtccacgtattgttcattcgtcagggcaaagtgctcggcagccgcagctatttcccgaaagtgcctggcggtacggaactgagcgaggtggtagaaaccttcgtaggccagttctatttacaaggcagccagatgcgcaccttaccgggtgagatcctgctcgattttaatcttagcgataaaacgctgctcgccgattccctttcagaactggcgggacgcaagattaatgttcaaaccaaacctcgcggcgatagggcgcgttatctgaaactcgcgcgcaccaatgcggcgacggccttaaccagcaaactttcgcagcaatctaccgttcaccagcgactgaccgcgcttgccagcgtgttgaaattgccggaagtgaagcggatggagtgctttgacatcagccataccatgggcgaacaaaccgtcgcttcctgtgtggtgtttgatgctaacggcccgctgcgtgcggagtatcggcgctataacattacaggcatcacgccgggcgatgattatgcggcgatgaatcaggtgctgcgtcggcgttatggtaaagccattgacgacagtaagatcccggatgtgatccttatcgacggcggcaaaggccagcttgcgcaggcgaaaaatgtcttcgccgaactggatgtctcatgggataaaaatcatccgctgctacttggcgttgccaaaggagcagatcgtaaggctgggctggaaacgctgttctttgagccggaaggtgagggattcagtttgccgccagattctcccgcgctgcatgttatccagcatattcgcgatgaatcacatgatcacgcgattggcgggcaccgtaaaaaacgggcgaaggtcaaaaataccagttccctggaaaccattgaaggcgtcgggccaaaacgtcggcaaatgttgttgaaatatatgggcggtttgcaaggtttacgtaacgccagcgtcgaggaaattgcaaaagtgccgggtatttcgcaaggtctggcagaaaagatcttctggtcgttgaaacattgatgtctctgtagcaacataggggtaatcttactgacaacagatagttacccgtcattatgcaatttaatatccctacgttgcttacactgttccgtgtcatccttatcccattctttgtattggtcttttatctgcctgtcacctggtcgccgtttgccgccgcgctcattttctgcgtcgcggcggtgactgactggttcgatggttttctggcacgccgctggaaccagagtacccggtttggtgctttccttgaccctgtagcagataaagttctcgtggctatcgccatggtgctggtaaccgagcattaccacagctggtgggtgaccttaccggcagcaacgatgatcgcccgtgaaattattatttctgcgctacgcgaatggatggcggagttgggtaaacgcagtagcgtggctgtctcctggattgggaaagtgaaaaccactgcccagatggtggcgttggcatggctgctgtggcgtccgaacatttgggttgagtacgccggtattgcacttttctttgtggctgcggtactgactctgtggtcaatgttgcaatatttgagcgctgcgcgtgcagatttgcttgatcagtgatcgtttcggcgtaattttcagcaaacgatcaaaagtggtgaaaaatatcgttgactcatcgcgccaggtaagtagaatgcaacgcatcgaacggcggcactgattgccagacgataataaaatcaagtgattaactgattgcttgatgaatgcgggaatagctcagttggtagagcacgaccttgccaaggtcggggtcgcgagttcgagtctcgtttcccgctccagtttaaaagacatcggcgtcaagcggatgtctggctgaaaggcctgaagaatttggcgcgttaacaaagcggttatgtagcggattgcaaatccgtctagtccggttcgactccggaacgcgcctccactttcttcccgagcccggatggtggaatcggtagacacaagggatttaaaatccctcggcgttcgcgctgtgcgggttcaagtcccgctccgggtaccatgggaaagataagaataaaatcaaagcaataagcagtgtcgtgaaaccaccttcgggtggtttttttgtgcctgcaacttgtcgttacaccctccttaatttttaatcaccggcaaagccactcaaaaagtatctctgatacggaccggcatgtaagataggtgctggcgagttgagatccacaaggaaaagcgtatgaaaacgggaccgttaaacgaaagtgagttggaatggctggacgatattctgaccaaatacaacactaaccacgccatccttgatgtggcggagctggacggtttattgacggcggtgttgagttctccgcaagagattgaaccggaacagtggctggttgccgtgtggggtggggctgactatgtgccgcgctgggcgtcagagaaagagatgacgcgctttatgaacctggcttttcaacatatggccgataccgcagagcgtctgaacgaattcccggagcagtttgagccgttattcggcttgcgagaagttgatggcagcgagctgacgattgttgaggagtggtgctttggctatatgcggggcgtggcactttctgactggtcaacgttgcccgattcgttaaaaccagcgctggaggcgattgcgctgcacggtactgaggaaaacttcgagcgggtagaaaagatgtcgccagaagcgtttgaagagagcgtagatgccattcgactggcggcgcttgatctacatgcgtactggatggcgcatccgcaggaaaaagctgttcagcaaccgatcaaagcagaagagaaaccggggcgtaacgatccttgcccgtgcggtagtggtaagaaatttaagcagtgctgcctgcattaagaggccaaattgggtgtcagcgttaattctggcacccaataaggaatttgaggctatctgatcaccccacttctggtaacaaccctgccgcaatcaaaaattgcacgccaatcacagcaataccacagagaaacaccaccaccagcgccggacgaccacctttgacccggtaacccgcctgaggattgtgctttctgctttgccaggtcaacagcgaagggataatcaatgccagtaccgccagcgccacaccggcgtaacccagcgccatcacaaatcctcgtggataaaacagtgcaaacgccaacggcggcagaaaggtaattgcaccagtttgcaaccgtccaccaacggtatttgaacgctgaaataaatcagccagataatcaaataagcctaacgcaacgccgagaaatgacgtggcgagggctaaatcagcaaataaatgcactgccagctcaacatgcggagaggccaccatttcgcgtaacgcctgtaacagcccgtttaatccagcatgattagccagcaatcccataaaggttgttgaatcaatgctgccaagcgttgccacctgccagaaaatatatgccaccagggggatcgcactaccggttataaacacccagcgtagcttacgaacgttgccatccatatagctgacaatactcggcacgctaccgtgaaaaccaaatgaggtaaaaatcaccgggattgctgacagagccagcccctgttgcaacggcagggttaaaagattcactttgtgaatatgcggtagcagcaataccagcatcaccaccagaaaaataattttggcgctgaacagaaaacggttaaataaatcgaccagcgatgttccaacacaaaccacgccaccggcaacaaaagtgaacaacagcacgccagcggttgccgacattgaaatacctgtccagtcgctgatgctggaggccaacaattcaccgacaccgctgatgtatgccgcagtcagagcatacattaagaacatcatactgaagcccgtcagccattgaccgtagcgtcccagatagcgttttgccagcgtgcccagaccggtatctgccggaacatgctggtacacctccagcagtaatagcgccgtgtagcacatcaacgcccaaagcccaatcaacaagattaacgtaacgctaaaaccaacaccggccgcagccagcggcattgccagcatgcctgcgccaattgtggttcccgccacgataaaaacacttcccagggttctgtttttcacgctttcttctgtcctgacgatctttatgagtgatatctgcggcgcaggttaaggcataacggctgcttcgtcaaaccgacgttacatatagtgtaaatataaatgtacaataaaaagcattcagtcctgcgctggcgcaaagtcttcataagcggcaatcgctacgctaggctttttttgaggaggaacgatggactctattcacggtcatgaagtgttaaatatgatgattgaatcaggcgagcaatatacgcatgccagtctggaagctgcgattaaagcgcgttttggtgaacaggcacgttttcacacctgctcggcagaagggatgacagcgggagagctggtagcgtttctggcagcaaaaggcaaatttataccttcgaaagacggtttttcgaccgatcagagtaagatttgccgtcactgatttgaaacggcggcagtaaacctgccgccggagagcattagttttgtgtgtcgagggtagagagttctttgtcgataaaatacagaccttcgccgcttttgcctgccaggcttaatttatcaataatcgatttgaacagtttctcttcttcatgctgctcagaaacataccactgcaggaaattaaatgttgggtagtcctgattggtcattgcagcatgagccagttcgttaattttctgggtgattaattgttcgtgtttataggtttcctggaataattcatcaagtgaggaatattcagcaaacggagattcaacggtattaatacgcggtaaattgccggtatcagtcaggtaatcaaacagacgctgcatatgcgtcatctcttcctgggcgtgacggcgcaggaacgcggcagcaccttcgaaggtatgatagctgcaccaggcgctcatttgctgataaagcagtgaagagtacagttccaggttcatctgctcattaagtttttcaatcatttctggtttcagcatgatagtgctccacaaaggttatatttgttgctgtggcgtcactataatttgttattttattatttgcaaaaggtaaaatataaacttcaattattaaaaatacgaatgggtgcaaaatggcatctgaatcgatcgcagtttggcattcgaatcgatcatgatttggcatccatctccgatcacagtttggcatcacaatcgatcacgatttggcatacttccgatcattgattggaattcgccagtcactccgggaattaactcttttcaccacagtctccattgccgtgtttaaaccagtggagacgtcaatgtccaaaaagagaaaatccaggagcactatggaaacttgttttaagatccttcagctcaagttcgataagaagctgactaaccgttgtatcggactgacgttacacatcagcgcctcaaccgtttttgaggttcttgcccgcttcaaagcctcttctctgtcatggccattacctgcggatatatcccatgacacgctggagaaactcattttcccgcccaaagacacctctgcgtcagagcttgttatgcctgacatgctgtacttcgatacggaaatgagaaaacctggcgtgacgcgccaactgttgtggatggaatacaaggcacaggcgggtgacaaagcgatgggatactcacacttctgccgttgctaccggaagtggaaaaaaacgcgacgcctctccatgcgacaggagcatcgtgctggcgaaaagctctttatcgacttctgtggtcctacggtccctgttattaatccggacaccggagagatacgccgcgtggcaatcttcgtggctgtaatgggggcgtccaactatacctatgttgaagcgtgcgaaggtcaggacatgatgtcatggttaaatgcccacagccgttgcctgaccttcctgggcggcgtaccgaagctgctcatccccgataacctcagaagcgcagtgaaaaaagccgatcgctatgagcctgtcatcaacgacagttatcaggcgctggctgagcactatggcacggttattatcccggcccgcccgcgcaaacctaaagataaaccaaaagcagaaaacggcgtcctcatcgtcgagcgatggcttcttgcccgcatccgtaatgaaaccttccacacgctcagggcgctgaatgcacgccttcgggagttgctgacggacatgaataaccgaccaatgaagggatacggtaatcaaacccgcgcagaacgcttccgcatgctggatgcaccagcactctctccgctgcctctggagccttatgaatacacggaatacaaagccgtgaaggttggccctgactaccacgttgaatatgcccgtcactggtactccgttccacacgaactggtcggtcagcgtctgtcactgaaggtggggcagtcggtggtacagctctggcacaaggggcagtgtgtggcgcaacatccgcgcagcacacatgaatataaacacacaaccaatccgcttcacatgccagaacgccaccggcggcatgggacatggacaccggaacgccttatcgagcagggaaaccgtacaggtccgtccacaggccgggtggttgaatccatgctgaaagccaaaccccatccggagctggcttaccgtgcagtcctgggtctgctggcacttcagaaaaaatacggcccggaacggctggaaaaggcctgttacgttgccctgcactataacgccccggacagacgctttatcgacaatctgctgcgtcatcatcgggataacgttgagcttccgttatcccgccagggcgaacaacatccggcatatgcttcagagcatgaaaacctgcgtggtcctggctactaccactgacagaaggaacaaccgtatgagtgataatctgttaaacaaactgacccaactgaaactcccggcgatggccgggagcctgatacggcaacgggaaacgcctcagacttacgacgaactgtcgttcgaggaaaggctgacactgctggttgatgacgagcttctgagcagagaaaacagtcgtgtggcacggttgagaaaaaatgcctgcctgaaatatcaggcaacaccggaagggctgcgttatccggcctcaagaggtctgcgggctgaacagatgagggaactgctgaacggccactacataatccacaggaaaaacctactgataaccggtccgacaggatgcggtaagagctggatagccaatgcgctgggcgaacaggcatgtcgacagaaatacagcgtccggtactgtagaaccgggcgattactggaacagttggctcagggacgtgttgatggcagttggctgaaatatctgaaacagttgcaaaaaatacaggttctaatcctggacgatctggggctggaacagttaagtaacgcccagtgtaatgaccttctggagatcacagaggatcgttacggacaaagcagcacgatagtggtaagccagttcccggtagataaatggcatggtctgatggagaacccaacaacagcagatgccatcctggacagactggtacataactcacacagagtggtccttcagggagagtccctgaggaaaaatcccccgacagtggaaagcagcgaaaaaacgagttaaaaagcggtagaaaaagttaagttcccggttgatcgaatggatgcgaatcgctgatcgaacttcgatgccaatccgtgatcgaatagagcggaatacgcaaatgggaataaaacgcattaccgctatttctttaatcagcgaagatcccctcgctgattaaaatatttagagaaagacagggaaggcggaatgatggcactgatatgacaaagtgaattccgtattcaaacataaggaacccgcaaaaaggctacagttgcctactggctgaccaaaggggaccgcgtgggtatagccttcctgctggcatgcgcgatcggcgatcccgcgactgacataacgatcggtatgggcatgctgcaaaaaagcctggtcataaaccaaccgtacaatacctgttgccgcgtcaacttcgctcacatgggcttggcgagtaaccgtacaccccgccagcgttattaatgaaagagtcagaatcagaagtctcatggtccagccagaagagtaagagaaagcactattttacgcgttacagcgctgcgacaatggccggaaaagacgcctggcaggcgctatttcttgccatctgtaggtgtcagaaataggggggctgttttttgattatcatttttataacattaaaggggtatttatgtgatttgtatcacataaagattgatttttgtgatggttgtcatattataagcgcaaagacaataacacctgtataacaaatggtcggagtgccgcgatgaaactgcgcaaaatcctgaaaagtatgttcaataactattgcaagacgttcaaagacgtaccgccaggcaatatgttccgataacaaaaaacctgctccggcaggtttttttgtgtcctgatgacggtggatgtgactatcgctgaagatgtgaagccgctactataacggctttcaaaatgctatcaggagtttacgatgtcccagccgctgaatgccgatcaggaactggtttctgatgtggttgcttgccagttggttatcaaacaaattctggatgttctcgatgtaatcgcgcccgttgaagttcgtgaaaaaatgtccagtcagctgaagaatatcgactttactaaccatcccgccgccgcagacccggtcaccatgcgggcaatccaaaaagccatcgcgcttattgaactcaagtttaccccacagggtgaatcccattaaaaaaaccgctgcttcaaacagatgaggcagcggtttctcaaaaccttcatcggcgcaatgcattagcgccgatgatgatcaatgcagctggtgtgacacgacattcagaacatgttggtcggtctgcacagggcacatacccgcaagtttcgcactgcgcacttcatcaagaatggtttgcagcaacagaccatcatgctgctgttctttttccagatcgcgcaggaaattgacggttgaatcatcattcagttctttcgcttcatcggctaactgtgccaacgtactagaacgttgctcgtattcttccatcgttttttggaacagttcttccagagagttcagtttttcaccgggaacatcaatggctttaacgatgggggtagcgccgacactcttcataaagttaaacatgcgcatcatttgggtcacattactctgtgcctgggcgcgaaggaaagtggcggtgccgttcagactctgttcagaacaccagttactcaggtgaaggtagagattggatgcgtaaaactcgcggttcatttgagagttgagtttgagaagcattccagcggttgccatacctaatatccttatatccagaagtggagaggtgcaagataaatcaaaacaccataattactgtttgcagaataattcctttctgccggtccgaaatgtgatcgtggagtcaattctgacgatgatctgaaataagaataacgtctgaacgggtataagaaaatgcttaaatcatcaagtttatatatttttacatttcattgatgaaatcaatgtaactgcaatgaattttaatgatagtgctttttgtatcttgttgatattaatcaatgaatttgaattcatgatgaagtgatgattttataaaacgttttttcatttttgcgagatggctctcattatacgtgttctgttaattaatgagcacagtgataattaatggcgaaatgaatgacgtgcattttccacatctttgagttgcggttattacaccatttcaaaaactcaacgccaggtaatgcggcctattgactggttaaaaagaagacatcccgcatgggtaccaaagacaacaaggatttccaggctaatcttatggattaatctgctgtgcattcgacaatttgtctgacaaattggctttcccttatgtcttttcccgctaaatttatgcacgttctcactgtaattctgcgatgtgatattgctctcctatggagaattaatttctcgctaaaactatgtcaacacggtcacttatcttttagataaaaggtaatgctttgttttccgattaatttaacgaaagtcattcgtttttgccctacacaaaacgacactaaagctggagagaaccatgcacaaatttactaaagccctggcagccattggtctggcagccgttatgtcacaatccgctatggcggagaacctgaagctcggttttctggtgaagcaaccggaagagccgtggttccagaccgaatggaagtttgccgataaagccgggaaggatttagggtttgaggttattaagattgccgtgccggatggcgaaaaaacattgaacgcgatcgacagcctggctgccagtggcgcaaaaggtttcgttatttgtactccggaccccaaactcggctctgccatcgtcgcgaaagcgcgtggctacgatatgaaagtcattgccgtggatgaccagtttgttaacgccaaaggtaagccaatggataccgttccgctggtgatgatggcggcgactaaaattggcgaacgtcagggtcaggaactgtataaagagatgcagaaacgtggctgggatgtcaaagaaagcgcggtgatggcgattaccgccaacgaactggatacggcacgtcgccgtacaacgggttctatggatgcgctgaaagcggccggattcccggaaaaacaaatttatcaggtacctaccaaatctaacgacatcccgggggcatttgacgctgccaactcaatgctggttcaacatccggaagttaaacattggctgatcgtcggtatgaacgacagcaccgtgctgggcggcgtacgcgcgacggaaggtcagggctttaaagctgccgatatcatcggcattggcattaacggtgtggatgcgttgagcgaactgtctaaagcacaggcaaccggcttctacggttccctgctgccaagcccggacgtacatggctataaatccagcgaaatgctttacaactgggtagcaaaagacgttgaaccgccaaaatttaccgaagttaccgacgtggtgctgatcacgcgtgacaactttaaagaagaactggagaaaaaaggtttaggcggtaagtaatttgccggaaaaattcccctctgcatgatgcagagggggtgtgaacgaccagtgattcacggagacgttatgcaacagtctaccccgtatctctcatttcgcggcatcggtaaaacgtttcccggcgttaaggcgctgacggatattagttttgactgctatgccggtcaggttcatgcgttgatgggtgaaaatggcgcaggaaaatcaactctcttaaaaatcctcagcggcaactatgcgccaaccacgggttctgtagtgattaatgggcaggaaatgtccttttccgacacgaccgcagcacttaacgcgggtgtggcgattatttaccaggaactgcatctcgtgccggaaatgaccgtcgcggaaaacatctatctcggccagctgccgcataaaggcggcattgtgaatcgctcattgctgaattatgaggcgggtttacaacttaaacatcttggtatggatattgacccggacacgccgctgaaatatctctccattggtcagtggcagatggttgaaatcgccaaggcgctggcgcgtaacgctaaaattatcgcctttgatgagccaaccagctccctttctgcccgcgaaatcgacaatcttttccgcgttattcgtgaactgcgaaaagaggggcgggtgatcttatacgtttctcaccgtatggaagaaatatttgccctcagcgatgccatcactgtctttaaagatggacgttatgtcaaaacctttaccgatatgcagcaggttgaccacgacgcgctggtgcaggcgatggtcgggcgcgacattggcgatatctacggctggcaacctcgtagttatggcgaggagcgcctgcgtcttgatgctgtgaaagcaccaggcgtgcgtacgccaataagtctggcggttcgcagtggtgaaattgttgggctgtttggtctggtaggggcggggcgtagcgaattaatgaaaggcttgtttggcgggacgcaaatcaccgccggtcaggtttatatcgaccaacagccgatcgatattcgtaaaccgagccacgccattgccgcaggcatgatgctctgcccggaagatcgcaaagcggaaggcattattcccgtgcactccgttcgcgacaatatcaacatcagtgccagacgcaaacatgtgctcggcggttgtgtaatcaacaacggttgggaagaaaacaatgccgatcagcacattcgttcgctcaacatcaaaacgccgggcgctgagcaactgatcatgaatctctcaggcggaaatcagcaaaaagccattctgggccgctggttatcggaagagatgaaggtcattttgctggatgaacctacgcgcagcattgatgttggtgctaagcacgaaatatataacgtaatttatgcgctggcggcgcagggtgtggcggtgctgtttgcctccagcgacttacctgaagtcctcggcgttgccgaccggattgtggtgatgcgggaaggtgaaatcgccggtgaattgttacacgagcaggcagatgagcgtcaggcactgagccttgcgatgcctaaagtcagccaggcagttgcctgagtaaggagagtatgatgtcttctgtttctacatcgggttctggcgcacctaagtcgtcattcagcttcgggcgtatttgggatcagtacggcatgctggtggtgtttgcggtgctctttatcgcctgtgccatttttgtcccaaattttgccaccttcattaatatgaaagggttgggcctggcaatttccatgtcggggatggtggcgtgtggcatgttgttctgccttgcttccggtgactttgacctttctgtcgcctccgtaattgcctgtgcgggtgtcaccacggcggtggttatcaacctgactgaaagcctgtggattggcgtggcagcggggttgctgcttggcattctctgtggcctggtcaatggctttgttatcgccaaactgaaaataaatgctctgatcacaacactggcaacgatgcagattgttcgaggtctggcgtacatcatttcagacggtaaagcggtcggtatcgaagatgaaagcttctttgcccttggttacgctaactggttcggtctgcctgcgccaatctggctcaccgtcgcgtgtctgattatctttggtttgttgctgaataaaaccacctttggtcgtaacaccctggcgattggcgggaacgaagaggctgcgcgtctggcgggtgtaccggttgttcgcaccaaaattattatctttgttctctctggcctggtatctgcgatagccggaattattctggcttcacgtatgactagtgggcagccaatgacgtcgattggttatgagcttattgttatctccgcctgcgttttaggtggcgtttctctgaaaggtggcatcggaaaaatctcatatgtggtggcgggtatcttaattttaggcaccgtggaaaacgccatgaacctgcttaatatttctcctttcgcgcagtacgtggttcgcggcttaatcctgctggcagcggtgatcttcgaccgttacaagcaaaaagcgaaacgcactgtctgatgcttttttccacaacaatttaacgttttttcccaccacagccagccgccacaacggttggctgttcttcattgcaaatggcgacccccgtcacactgtctatacttacatgtctgtaaagcgcgttctgcgcaaaacaataagaaaagagaaggaggagagccgggtgacagaaccgttaaccgaaacccctgaactatccgcgaaatatgcctggttttttgatcttgatggaacgctggcggaaatcaaaccgcatcccgatcaggtcgtcgtgcctgacaatattctgcaaggactacagctactggcaaccgcaagtgatggtgcattggcattgatatcagggcgctcaatggtggagcttgacgcactggcaaaaccttatcgcttcccgttagcgggcgtgcatggggcggagcgccgtgacatcaatggtaaaacacatatcgttcatctgccggatgcgattgcgcgtgatattagcgtgcaactgcatacagtcatcgctcagtatcccggcgcggagctggaggcgaaagggatggcttttgcgctgcattatcgtcaggctccgcagcatgaagacgcattaatgacattagcgcaacgtattactcagatctggccacaaatggcgttacagcagggaaagtgtgttgtcgagatcaaaccgagaggtaccagtaaaggtgaggcaattgcagcttttatgcaggaagctccctttatcgggcgaacgcccgtatttctgggcgatgatttaaccgatgaatctggcttcgcagtcgttaaccgactgggcggaatgtcagtaaaaattggcacaggtgcaactcaggcatcatggcgactggcgggtgtgccggatgtctggagctggcttgaaatgataaccaccgcattacaacaaaaaagagaaaataacaggagtgatgactatgagtcgtttagtcgtagtatctaaccggattgcaccaccagacgagcacgccgccagtgccggtggccttgccgttggcatactgggggcactgaaagccgcaggcggactgtggtttggctggagtggtgaaacagggaatgaggatcagccgctaaaaaaggtgaaaaaaggtaacattacgtgggcctcttttaacctcagcgaacaggaccttgacgaatactacaaccaattctccaatgccgttctctggcccgcttttcattatcggctcgatctggtgcaatttcagcgtcctgcctgggacggctatctacgcgtaaatgcgttgctggcagataaattactgccgctgttgcaagacgatgacattatctggatccacgattatcacctgttgccatttgcgcatgaattacgcaaacggggagtgaataatcgcattggtttctttctgcatattcctttcccgacaccggaaatcttcaacgcgctgccgacatatgacaccttgcttgaacagctttgtgattatgatttgctgggtttccagacagaaaacgatcgtctggcgttcctggattgtctttctaacctgacccgcgtcacgacacgtagcgcaaaaagccatacagcctggggcaaagcatttcgaacagaagtctacccgatcggcattgaaccgaaagaaatagccaaacaggctgccgggccactgccgccaaaactggcgcaacttaaagcggaactgaaaaacgtacaaaatatcttttctgtcgaacggctggattattccaaaggtttgccagagcgttttctcgcctatgaagcgttgctggaaaaatatccgcagcatcatggtaaaattcgttatacccagattgcaccaacgtcgcgtggtgatgtgcaagcctatcaggatattcgtcatcagctcgaaaatgaagctggacgaattaatggtaaatacgggcaattaggctggacgccgctttattatttgaatcagcattttgaccgtaaattactgatgaaaatattccgctactctgacgtgggcttagtgacgccactgcgtgacgggatgaacctggtagcaaaagagtatgttgctgctcaggacccagccaacccgggcgttcttgttctttcgcaatttgcgggagcggcaaacgagttaacgtcggcgttaattgttaacccctacgatcgtgacgaagttgcagctgcgctggatcgtgcattgactatgtcgctggcggaacgtatttcccgtcatgcagaaatgctggacgttatcgtgaaaaacgatattaaccactggcaggagtgcttcattagcgacctaaagcagatagttccgcgaagcgcggaaagccagcagcgcgataaagttgctacctttccaaagcttgcgtaggagcggttaatctcccgtaagtggaactaacagcacatcgacctcacttgaggcaatcactcttttcgccgagcaggatgctcgcgaaaagaaactgtgattgtgattaccgcaaatcaccaaatcgaaatgatgtttgtgacatacttccagaatatgttcgcttaactcaccgtaggcaataaacgtcttgtcaacgggataccccgcatcctgaattaacttatcaagaaagctttgcgtttcttcttgcatcacgctgcgtaaatcttcaagcatcggcgcggctaattgattgtacatttccgggtcggaagcgagagtaattaaactgatgtgtccctttactggcctggcgatagataccgcttttgccagcagttgctgactttccggtgtaaccgcaacagcgacaagaatattgctatagctcataacctgttccttattctgtgaacttcaggtgacattaaagctttactcctaatggagaaacgacgcaatcccaactcggtcaaacaggtaaatattagtctgattattagtaaagacaattaatcaatcactcccggtgatcatataatttcaaatgtaattataagaaaatagtgtactgattctccgcattaaacaagtggttaatatatgtaaaacatttcattaacattaagttgattgttgcctttctttgtatttaattagtttgttgtgcggtaagtgtctgtttaaaaatagcttatctggtattgcatgaaagtgattatttatagcagatgattatttacggtgatttattttaactgtgcgcaacatcccatttcgattattcctgtttcatttttgcttgctagcgtagcgaaaaactttttaacatattgaaatacacccaaaacaaaagtatgacttatacatttatgttaagtaattgagtgttttgtgtgatctgcatcacacattattgaaaatcgcagcccccctccgttgtatgtgcgtgtagtgacgagtacagttgcgtcgatttaggaaaaatcttagataagtgtaaagacccatttctatttgtaaggacatattaaaccaaaaaggtggttctgcttattgcagcttatcgcaactattctaatgctaattattttttaccggggcttcccggcgacatcacggggtgcggtgaaaccgcataaaaataaagttggttattctgggtgggaataatgcatacctccgagttgctgaaacacatttatgacatcaacttgtcatatttactacttgcacagcgtttgattgttcaggacaaagcgtccgctatgtttcgtctcggcataaatgaagaaatggcgacaacgttagcggcactgactcttccgcaaatggttaagctggcagaaaccaatcaactggtttgtcacttccgttttgacagccaccagacgattactcagttgacgcaagattcccgcgttgacgatctccagcaaattcataccggcatcatgctctcaacacgcttgctgaatgatgttaatcagcctgaagaagcgctgcgcaagaaaagggcctgatcatgagtgaaaaaagcattgttcaggaagcgcgggatattcagctggcaatggaattgattaccctgggcgctcgtttgcagatgctggaaagcgaaacacagttaagtcgcggacgcctgataaaactttataaagaactgcgcggaagcccaccgccgaaaggcatgctgccattctcaaccgactggtttatgacctgggaacaaaacgttcatgcttcgatgttctgtaatgcatggcagtttttactgaaaaccggtttgtgtaatggcgtcgatgcggtgatcaaagcctaccgtttataccttgaacagtgcccacaagcagaagaaggaccactgctggcattaacccgtgcctggacattggtgcggtttgttgaaagtggattactgcaactttccagctgcaactgctgcggcggcaattttattacccacgctcaccagcctgttggcagctttgcctgcagcttatgtcaaccgccatcccgggcagtaaaaagacgtaaactttcccagaatcctgccgatattatcccacaactgctggatgaacagagagtacaggctgtttaactgatacggtgaggcgcaacattccagcagcggtaacgacgtaccgctgctttttttgccccaatcgcgcgttaacgcctgacgactgaacatcctgtcatggtcaacagtggaaggatgatgtcgtgcttatcttattaggttacctggttgttctcggtacagttttcggcggttatttgatgaccggtggaagccttggagcactctatcaacccgctgaactggtgattattgccggtgcagggattgggtcgtttatcgtcggcaataatggcaaagcgattaaaggcacgctgaaggcgctgccgttgctgtttcgtcgctccaaatacaccaaagcaatgtatatggatctgctggctctgctttatcggttgatggcgaaatcgcggcagatggggatgttttcgctggaacgtgatattgaaaatccccgtgagagcgagatcttcgccagctacccacgcatcctcgcggatagcgtcatgcttgattttatcgtcgattatctgcgtctgattatcagcggtcatatgaacaccttcgaaatcgaagccctgatggatgaagagattgagacgcacgaaagcgaggcagaagtcccggcgaacagtctggcgctggtcggggactcacttccggcgtttggtattgtcgcggctgtaatggggggcgttcacgcgttaggttcagccgatcgtcctgccgccgagctgggtgcgcttatcgcacatgcgatggtggggactttcctcggcattttattggcttacggatttatttccccattagcgagtgttttacgtcagaaaagcgccgaaaccagcaaaatgatgcagtgcgtcaaagtcactctgctttctaatctgaacggttacgcaccgcctatcgccgttgagtttggtcgcaaaacgctctattccagcgaacgtccgtcgtttattgaactggaagagcatgtgcgtgcggtgaaaaatccgcaacaacagacgacaaccgaggaagcatgaagaatcaagcgcatccgattattgtcgtcaaacgacgcaaagccaaaagccacggggcagcacatggatcgtggaagattgcttatgccgactttatgactgcgatgatggccttttttctggtgatgtggctgatctccatctccagcccaaaagagctgattcagattgcggagtacttccggactccactggcgactgcggttacgggcggcgatcgcatttctaatagtgaaagcccaattcccggcggtggtgatgattacacccaaagccagggggaagtgaataagcagccgaacatcgaagatctgaaaaaacgcatggagcaaagtcgattgcggaaattgcggggtgatctcgaccagttgatagagtccgatccgaaactgcgggcgttacgtccccatctcaaaatcgatctggtccaggaaggtctacgtattcagatcatcgatagccagaatcgcccgatgtttagaaccggcagtgccgatgtcgaaccctatatgcgcgacattctgcgtgccattgcgcctgtactgaacggtattcccaaccgtattagcctttcaggtcataccgatgatttcccctacgccagcggtgagaaaggatatagcaactgggagctttctgccgatcgggccaatgcatcccgccgcgaactgatggtcggagggttggatagcggcaaagtgttacgtgtcgtcggcatggcggcaacgatgcgcttaagcgatcgcggacctgatgatgccgtcaaccgtcgcatcagcctgctggtactgaacaaacaagccgaacaggccattttgcatgaaaacgccgaaagccagaatgagccagtaagcgccctggaaaaacctgaggttgcaccacaggtcagtgttcccacaatgccatcagccgaaccgaggtgacagcgtgagcatggatataagcgatttttatcagacattttttgatgaagcggacgaactgttggctgacatggagcagcatctgctggttttgcagccggaagcgccagatgccgaacaattgaatgccatctttcgggctgcccactcgatcaaaggaggggcaggaacttttggcttcagcgttttgcaggaaaccacgcatctgatggaaaacctgctcgatgaagccagacgaggtgagatgcaactcaacaccgacattatcaatctgtttttggaaacgaaggacatcatgcaagaacagctcgacgcttataaacagtcgcaagagccggatgccgccagcttcgattatatctgccaggccttgcgtcaactggcattagaagcgaaaggcgaaacgccatccgcagtgacccgattaagtgtggttgccaaaagtgaaccgcaagatgagcagagtcgcagtcagtcgccgcgacgaattatcctttcgcgcctgaaggccggggaagtcgacctgctggaagaagaactgggacatctgacaacgttaactgacgtggtgaaaggggcggattcgctctcggcaatattaccgggcgacatcgccgaagatgacatcacagcggtactctgttttgtgattgaagccgatcagattacctttgaaacagtagaagtctcgccaaaaatatccaccccaccagtgcttaaactggcagccgaacaagcgccaaccggccgcgtggagcgggaaaaaacgacgcgcagcaatgaatccaccagcatccgtgtagcggtagaaaaggttgatcaattaattaacctcgtcggcgagctggttatcacccagtccatgcttgcccagcgttccagcgaactggacccggttaatcatggtgatttgataaccagcatggggcagttacaacgtaacgcccgtgatttgcaggaatcagtgatgtcgattcgcatgatgccgatggaatatgtttttagtcgctatccccggctggtgcgtgatctggcgggaaaactcggcaagcaggtagaactgacgctggtgggcagttctactgaactcgacaaaagcctgatagaacgcattatcgacccgctgacccacctggtacgcaatagcctcgatcacggtattgaactgccagaaaaacggctcgccgcaggtaaaaacagcgtcggaaatttaattctgtctgccgaacatcagggcggcaacatttgcattgaagtgaccgacgatggggcggggctaaaccgtgagcgaattctggcaaaagcggcctcgcaaggtttgactgtcagcgaaaacatgagcgacgacgaagtcgcgatgctgatatttgcaccaggcttctccatggcagagcaggtcaccgacgtctccgggcgcggcgtcggcatggacgtcgttaaacgtaatatccaggagatgggcggtcatgtcgaaatccagtcgaagcaggggactggcactacgatccgcattttactgccgctgacgctggccatcctcgacggcatgtccgtacgcgttggggatgaagttttcattctgccgctgaatgctgttatggaatcactgcaaccccgtgaagccgatctccatccactggccggcggcgagcgggtgctggaagtgcggggtgaatatctgcccatcgtcgaactgtggaaagtgttcaacgtcgcgggcgcgaaaaccgaagccacccagggaattgttgtgatcttacaaagtggcggtcgccgctacgccttgctggtggatcaattaattggtcaacaccaggttgtggttaaaaaccttgaaagtaactatcgcaaagtccccggcatttctgctgcgaccattcttggcgacggcagcgtggcactgattgttgatgtctccgccttgcaggcgataaaccgcgaacaacgtatggcgaacaccgccgcctgaatgagtaaaaaggtaacaatatgaccggtatgacgaatgtaacaaagctggccagcgagccgtcaggccaggaatttctggtatttacccttggtgatgaagagtacggtattgatatcctgaaagtgcaggagatccgtggctacgatcaggtaacacggattgcgaacacgccagcgtttatcaaaggcgtcacgaatctgcgcggcgttattgtgccgattgttgacttacgaattaagttcagccaggtggatgtggactataacgacaacacggtagttatcgtcctgaatctcggacagcgggtggtcggcatcgtggttgacggcgtttcagacgtgctttcattgacggcggagcaaattcgtccggcaccagagtttgccgtgacgctttcaacagaatatctcactggactgggcgcactgggcgaccgtatgttgattctggtgaacatcgaaaaactgctgaacagcgaagagatggcgctgttagatagcgcggcgtcagaagtggcgtaattctcccgatttcctcaattgaaatgaacccgatgatctgcgcatcgggttttttatttcaatttcgcggcgggtggcatcagcaataaagtttccccccttcttgccgataacgagatcaacttgttttcaggaaggtgccttatgattaaccgtatccgcgtagtcacgctgttggtaatggtgctgggggtattcgcactgttacagcttatttccggcagtctgtttttttcttcccttcaccatagccagaagagctttgtggtttccaatcaattgcgggaacagcagggcgagctgacgtcaacctgggatttaatgctgcaaacgcgcattaacctgagtcgttcagcggtgcggatgatgatggattcctccaatcaacaaagtaacgccaaagttgaattgctcgatagcgccaggaaaacattggcgcaggcagcgacgcattataaaaaattcaaaagcatggcaccgttacctgaaatggtcgctaccagtcgtaatattgatgaaaaatataaaaactattacacagcgttaactgaactgattgattatctagattatggcaatactggagcttatttcgctcagccaacccagggaatgcaaaatgcaatgggcgaagcgtttgctcagtacgccctcagcagtgaaaaactgtatcgcgatatcgtcactgacaacgcagatgattaccgatttgcccagtggcaactggcggttatcgcgctggtggtggtattgattctgctggtggcgtggtacggcattcgccgtatgttgcttactccgctggcaaaaattattgctcacattcgcgaaatcgccggtggtaacctagcgaataccctgaccattgacgggcgcagtgaaatgggcgacctggcgcagagcgtttcacatatgcaacgctctttgactgacaccgtcactcatgtccgcgaaggttcagatgccatctatgccggtacccgtgaaattgcggcgggcaacaccgatctttcctcccgtactgaacagcaggcatccgcgctggaagaaactgccgccagcatggagcagctcaccgcgacagtgaagcaaaacgccgataacgcccgccaggcctcgcaactggcgcaaagtgcctccgacaccgcccagcacggcggcaaagtggtggatggcgtagtgaaaacgatgcatgagatcgccgatagttcgaagaaaattgccgacattatcagcgttatcgacggtattgccttccagactaatatcctcgcgctgaatgccgcggttgaagccgcgcgtgcgggtgaacagggccgtggttttgccgtggtggcgggtgaagtgcgtaatcttgccagtcgcagcgcccaggcggcaaaagagatcaaagccctcattgaagactccgtcgcacgcgttgataccggttcggtgctggtcgaaagcgccggggaaacaatgaacaatatcgtcaatgctgtcactcgcgtgactgacattatgggcgagattgcatcggcatcggatgaacagagccgtggcatcgatcaagtcgcattggcggtttcggaaatggatcgcgtcacgcaacagaacgcatcgctggtgcaggaatcagctgccgccgccgctgcgctggaagaacaggcgagtcgtttaacgcaagcggtttccgcgttccgtctggcagccagcccactcaccaataaaccgcaaacaccatcccgtcctgccagtgagcaaccaccggcacagccacgactgcgaattgctgaacaagatccaaactgggaaacattttgacgagtatttactaacgcggtcattgccgcctgatggggagcgttgatgtttaatcgtattcgaatttcgaccacgctgtttttaattttgattctctgcgggatcttgcagattggcagtaacggcatgtctttttgggcatttcgcgacgatttgcaacgactgaatcaggtcgagcagagcaatcagcaacgtgcggcattagcgcaaactcgggcggtaatgttacaggccagtaccgcgctgaacaaagcgggcactctgacggcacttagctatccggcggatgacattaaaacgttgatgacgacggcgcgcgccagtctgacgcaatccaccacgctgtttaaaagttttatggcgatgactgcgggcaacgagcacgtcagggcattgcaaaaagagacggagaaaagttttgcccgctggcacaacgatctcgaacatcaggcgacctggcttgaaagtaatcaactttcggatttcctcactgcgccggtgcagggatcacagaatgcgtttgacgttaactttgaggcctggcagctggagatcaaccatgtgctggaagccgccagtgcgcaaagccagcgtaactatcagatttcgacactggtgtttatcagcatgattattgttgcggcgatctacatcagcagtgcgctgtggtggacgcgcaagatgattgttcaaccactggccattatcggtagccattttgacagcattgctgcgggtaatctggcgcgtccgattgcggtatatggtcgtaatgagatcaccgccatttttgccagtctgaagaccatgcagcaggctttgcgtgggacggtaagtgatgtgcgtaagggaagccaagagatgcacattggtatcgcggagattgtcgcaggcaataacgatctctcaagtcgtaccgaacagcaggcggcatcgctggcacaaacggccgccagtatggagcaattaaccgccacggtagggcaaaacgccgataacgcacgacaggcgtcggaactggcaaaaaatgccgcgacaacggcgcaggcgggcggtgttcaggtcagtaccatgactcacaccatgcaggagatcgccaccagctcgcaaaaaattggcgacattatcagcgttatcgacggaattgctttccagaccaatattctggccctgaatgcggcagtggaagcggctcgcgccggagagcaggggcgtggttttgcggtagtggcaggtgaagtgcgcaatcttgccagccgtagcgcgcaggcagcaaaagagatcaaagggctgatcgaagagtcagtcaatcgtgtccagcagggttcgaaactggtgaataacgccgccgcgaccatgatcgatattgtcagttcggtgacccgcgtgaacgacattatgggagaaattgcctctgcgtcggaagaacaacagcgggggattgagcaggttgcacaggctgtcagccagatggatcaggtgactcagcagaacgcctcgctggtagaagaagcggcggtggcaacggaacaactggcgaatcaggccgaccatctttcgtcgcgtgtggcggtatttacccttgaagaacatgaagtagcacgacatgagtcggcgcagttacaaattgcgccagtggtatcctgaagtgattgagaaggcgctatgacttcatctctgccctgtgggcaaacgtctttattgttacagatgaccgagcgcctggcgctttccgacgcgcattttcggcggataagtcaattgatctatcaacgagccgggatcgttctggctgaccataaacgcgacatggtttacaaccgactggttcgtcgtttgcgttcgctgggactgacggatttcggtcattatctgaacttgctggaatctaatcagcacagcggtgagtggcaggcgtttatcaattcgctgaccacgaatctgacggcatttttccgtgaggcacaccatttccctctgctcgcggatcacgcacgtcgccgttctggcgagtatcgcgtatggagcgcggcggcttcgaccggcgaagagccgtacagcattgcgatgacgctggctgacacattgggcaccgcgcccggacgctggaaagtgtttgccagtgatatcgacaccgaagtgctggaaaaagccagaagcggtatttatcgccatgaagagttgaaaaacctgacgccgcagcaactgcaacggtatttcatgcgagggacgggaccgcatgaagggctggtacgcgtgcgtcaggagctggcgaactatgttgattttgccccgctgaatctactggcgaaacagtacaccgtgccggggccgtttgatgcgatcttctgtcgtaacgtcatgatctacttcgatcaaaatacccagcaggagattttgcgccgctttgttccgctccttaaacccgacggattgctgtttgcgggtcactctgaaaactttagccaccttgagcgccgcttcacgctgcgtggtcagacggtgtatgcgctaagtaaggattaacgatgagcaaaatcagggtgttatctgtcgatgattcggcactgatgcgccagatcatgacagaaatcatcaacagccatagcgacatggaaatggtggcgaccgcgcctgatccgctggtcgcgcgtgacttgattaagaaattcaatcccgatgtgctgacgctggatgttgaaatgccgcggatggacggactggatttcctcgaaaaattaatgcgtttgcgtccaatgcccgttgtgatggtttcttccttgaccggcaaaggatcagaagtcacgctgcgcgcgctggagctgggggcaatagattttgtcaccaaaccgcaactgggtattcgcgaaggaatgctggcgtatagcgaaatgattgctgaaaaggtgcgtacggcagcaaaggcgagccttgcagcacataagccattgtcagcaccgacaacgctgaaggcgggtccgttgttgagttctgaaaaactgattgcgattggtgcttcaacgggtggaactgaggcaattcgtcacgtactgcaaccgttgccgctttccagcccggcattgttaattacccaacatatgccgcccggtttcacccgctcttttgccgacagacttaataagctttgccagatcggggttaaagaagccgaagacggagaacgtgtcttgccggggcatgcctatattgcgccgggcgatcggcatatggaactggcgcgtagtggcgcaaattatcaaatcaaaattcacgacggcccggcggttaaccgtcatcggccttcggtagatgtgttgttccattctgtcgccaaacaggcggggcgtaatgcggttggggtgatcctgaccggtatgggcaacgacggcgcggcgggaatgttggcgatgcgtcaggcgggggcatggacccttgcgcaaaacgaagcaagttgcgtggtgttcggcatgccgcgcgaggccatcaatatgggtggtgtctgcgaagtggtcgatcttagccaggtaagccagcaaatgttggcaaaaattagtgccggacaggcgatacgtatttaaatcaggagtgtgaaatggcggataaagaacttaaatttttggttgtggatgacttttccaccatgcgacgcatagtgcgtaacctgctgaaagagctgggattcaataatgttgaggaagcggaagatggcgtcgacgctctcaataagttgcaggcaggcggttatggatttgttatctccgactggaacatgcccaatatggatggcctggaattgctgaaaacaattcgtgcggatggcgcgatgtcggcattgccagtgttaatggtgactgcagaagcgaagaaagagaacatcattgctgcggcgcaagcgggggccagtggctatgtggtgaagccatttaccgccgcgacgctggaggaaaaactcaacaaaatctttgagaaactgggcatgtgaggatgcgactatgatgcaaccatcaatcaaacctgctgacgagcattcagctggcgatatcattgcgcgcatcggcagcctgacgcgtatgctgcgcgacagtttgcgggaactggggctggatcaggccattgccgaagcggcggaagccatccccgatgcgcgcgatcgtttgtactatgttgtgcagatgaccgcccaggctgcggagcgggcgctgaacagtgttgaggcgtcacaaccgcatcaggatcaaatggagaaatcagcaaaagcgttaacccaacgttgggatgactggtttgccgatccgattgaccttgccgatgcccgtgaactggtaacagatacacgacaatttctggcagatgtacccgcgcataccagctttactaacgcgcaactgctggaaatcatgatggcgcaggattttcaggatctcaccgggctggtcattaagcggatgatggatgtcattcaggagatcgaacgccagttgctgatggtgctgttggaaaacatcccggaacaggagtcgcgtccaaaacgtgaaaaccagagtttgcttaatggacctcaggtcgataccagcaaagtcggcgtggtagccagtcaggatcaggtggacgatttgttggatagtcttggattttgatttgtattgcctgatgtggcgtgaccacgtcatatcaggcggtctgataaggcgatgacgccgcatccgacaaacgcacactatgcttgatgtgtggcagcaaaagccctaaatcccgcctgttttgccccttactcaaaccattgaacgctttgcgctctggcatcatttaagcttaatactctttccaggattggcgacgtgtctgacgagagcgacgacaaaacagaagcccccacacctcaccgactagaaaaagcgcgggaagaggggcaaatcccgcgttcccgtgaactgacctcgttgctgattttgttagtgggcgtgtgtgttatctggtttggcggtgtgtcgctggcccgtcgattgtcgggcatgctctccgctgggctgcattttgatcacagtatttatatgaacgcatcccgtttgcaaggcatccattgttttgacatgacgggtaggttgcagctttatatccggctttattgcagccgtaacgctgcgagcccctatgtaattcgccgactccccccttattttcacggcggacttcaagcccaaaatactgttcaggtttagtgagtcacggtcttacctgtctttgtcatcactctggccgccatagcaacctttcagcattcacccttttgttaagagttcattgtttaatggtatcagcgattaatatggtctgatactgacgtggttcctgtcatacttacggtcatgggcggttatcgcccatactgttcgtgccagcttgtttgccatggcgacgattgccacactggctggacgacgttttttcagttcggttatccacgggccaggctctttagctactaatgccaccgctcttgcaccgtggataaataatgtcctgagataagtgtcaccacgtttgcttatccccagcagacgtactttccctccggagccagtttgttttggaaccagaccaacatatgcggcgaactctcgccccgatttaaacgctgatgcttcccccatggtggccaccgctgccgtcgcaataagtggtccaacgccaggaatatccagcaaccgcttacaggtttcattctgcctcgccacgctggtaagctgtttttcaatatcctctatcagtgggtgatgctgccaacttactgatttagtgtatgatggtgtttttgaggtgctccagtggcttctgtttctatcagctgtccctcctgttcagctactgacggggtggtgcgtaacggcaaaagcactgccggacatcagcgctatctctgctctcactgccgtaaaacatggcaactgcagttcacttacaccgcttctcaacccggtacgcaccagaaaatcattgatatggccatgaatggcgttggatgccgggcaactgcacgcattatgggcgttggcctcaacacgattttacgtcacttaaaaaactcaggccgcagtcggtaacctcgcgcatacagccgggcagtgacgtcatcgtctgcgcggaaatggacgaacagtggggctatgtcggggctaaatcgcgccagcgctggctgttttacgcgtatgacagtctccggaagacggttgttgcgcacgtattcggtgaacgcactatggcgacgctggggcgtcttatgagcctgctgtcaccctttgacgtggtgatatggatgacggatggctggccgctgtatgaatcccgcctgaagggaaagctgcacgtaatcagcaagcgatatacgcagcgaattgagcggcataacctgaatctgaggcagcacctggcacggctgggacggaagtcgctgtcgttctcaaaatcggtggagctgcatgacaaagtcatcgggcattatctgaacataaaacactatcaataagttggagtcattaccctatcagtgagtccagctcattcagtcggttgtactggttttccagaaccataatgagatacggtggcagtctctctttcatccgttccagtgcttcggggaactcccgctccatcgctgcccggcctttgtggatggtttcaccaaactccagtaacgtcccgtgcagggcattaatttgtgcggtccggaacttcaccagttgcatgcgggtacggtgcagaaccagtaccgactgctgttcttctgtttttacggcgatttctttacccggctgctgaaccgccatccagatagcccgggcatccatcacatcattcttattgcccatgacgaatgccttaacgaagcgggcctgcaacaaccggactttatgaccaagttttgtcagttcccgtgcccagtgctgagaacctccacaggcctccataccaatcaggcatggctcacggttgccgaagaacgtcagaaaatcctgtctacgcaactgtttatcaaccacttcacctgtgtgctcattgatgaagtgaatctgaatgacatgttttgcgatatcaacgccaaccggtgtatatttcatttgtggagtctccagtctgagggagctttatgcatcccgtattgggcactatgatgccggaaatctgcgaggctccacacctgccagtttcacccttttaaccatcatactgctccgtgtttaattgtgtgggatgcgttcattacattttcaatgacccgaatctgatcctcgggcagattattctgctgatcagagaagccatgctggcgctgctgccgctgattagcggcgtggtgctggtggcgctcatttctccggtcatgctgggggggctggtatttagcggcaaatccttgcagccgaagttttccaaactcaacccgctaccgggcattaaacggatgttctcggcacagactggcgcggagttgcttaaggcaattttgaaaaccatcctggttggcagcgtgacggggttttatctctggcatcactggccgcagatgatgcgcttaatggccgagtctccgactaccgccatgggtaatgcgatggatctggttgggctatgcgcactgctggtggtgcttggtgtcattccaatggtgggatttgacgtctttttccaaatcttcagccacctgaaaaagctgcgtatgtcgcggcaggatattcgtgatgagttcaaacaaagcgaaggtgaccctcatgttaaagggcggatccgtcagatgcagcgagctgctgcacggcgtcggatgatggccgatgtgccgaaagctgatgtcattgtcaataacccgacccactattcggtagcgttgcagtatgacgaaaacaaaatgagcgcaccgaaagtggtcgctaaaggtgcagggctggtcgcgctgcgcattcgtgaaattggcgctgaaaataacgtcccgacgcttgaagcgccgccgctggcgcgagcgctgtatcgacatgcggagattggtcaacaaatcccgggtcaactgtacgccgcggtggcggaagtgctggcctgggtctggcaactgaaacgctggcgtctggctggtggacagcgccctgtacaacctactcatcttccggtgccggaagccctggattttattaacgagaaaccgacccatgagtaatctggccgcgatgctgcgcctgcccgcaaacctgaaatcgacacaatggcagatccttgccggaccgattttgatcctgttgatcttgtcgatgatggtgctgccactgcccgcattcatactcgacctgttgtttaccttcaatattgccttgtcgatcatggtgttgctggtggcgatgtttacccagcgcacgcttgagtttgctgcgtttccgaccattctgttgtttactacgttgttgcgtctggcacttaacgtggcttcaacccgtatcattttgatggaagggcataccggcgcggcggcggcagggaaggtggtcgaagcgttcggtcacttcctcgttggtggcaatttcgctatcggtatcgtggtgtttgtcattctcgtgatcatcaactttatggtcattaccaaaggtgccgggcgtatcgcagaagtgggtgcgcgctttgttctcgatggtatgccgggtaagcagatggcgattgacgccgaccttaacgctggattgattggtgaagatgaggcgaaaaaacgccgctccgaagtgactcaggaagccgatttttacggctcaatggacggggcaagtaagtttgttcgcggcgatgccatcgccgggatcctcatcatggtcattaacgttgtcggcgggttgctggtcggcgtgctgcaacatggcatgagcatgggacacgcggcggaaagttatacgctattgaccattggcgacggtctggtggcacaaattccggcgctggtgatttctaccgccgcgggggtcatcgttacgcgtgtcagcaccgatcaggatgttggcgagcagatggtgaatcagcttttcagtaacccaagcgttatgttgttaagcgccgccgtgctcggtttactcggcctggtgcctggaatgccgaacctggtatttttgctgttcactgccggattgctcgggctggcctggtggatacgcggacgcgaacaaaaagcgcctgccgaacccaaaccggtaaaaatggcagagaataataccgttgtcgaagcgacgtggaacgatgtacaactggaagattctctgggaatggaagtgggttatcgactgatcccgatggtcgatttccagcaggatggtgagttgttgggccgtatacgcagtatccgcaagaaatttgcccaggagatgggatttctgccgccagtggtgcacattcgcgacaatatggatctgcaacctgcccgctatcgcattttgatgaaaggcgtggagattggcagtggtgatgcttatccggggcgctggctggcgattaaccctggaaccgctgccgggacgttacctggtgaggcgaccgtcgatccggcatttggcctgaatgctatctggattgaaagtgcgctaaaagaacaggcgcagattcaggggtacacagtggttgaggccagcacggtggtagcaacgcatcttaaccacctcattagccagcatgccgcagagctgtttggtcgtcaggaggcgcaacagctgttggatcgcgtcgcccaggagatgccaaagctgacggaagatctcgttcctggcgtcgtcacgctcaccacactgcataaagtgctgcaaaatctcctcgatgaaaaagtaccgattcgcgatatgcgcaccattctcgaaacgctggcggaacatgcgcccatccaaagcgatccacatgaattaaccgccgtcgtgcgcgtggcgttgggacgggcgattacccagcagtggtttcctggcaaagatgaagtccatgttattggcctcgatacaccgctggaacgtttgttactacaggcgctgcagggcgggggaggactggagccagggctggcggatcgtttactggcgcaaactcaggaagcgctatcccgtcaggagatgctgggcgcgccgccagtattgttggtgaaccacgcgctgcgaccattattgtctcgcttcctgcgccgcagcttgccgcagttagtggtcctgtcgaatctggaactgtctgataaccgacatatccgcatgacggcgacaattggcggcaaataatgagaaccttattagcaatattattgtttccgctgctggtgcaagccgccggggaggggatgtggcaggcaagtagtgtaggaattacgctaaatcatcgcggtgagtcgatgtcgtctgcgcctctttctacgcgacaacctgcttcaggattgatgacgctggtagcgtggcgttatcagcttatcggcccgacaccttcaggactgcgggttcgcttgtgttcgcaatctcgttgtgtcgaattagaggggcagagcggaaccaccgtggccttttccggtatagcggcagcagaaccgttgcgatttatctgggaagtgccaggcggtgggcggttaattccaccgctaaaggtacaacgtaatgaagtgattgtgaattatcgctgaaggacaaaaaaattacgcgctcgcgagtatgtttaataactcagtgaaaaaggctcgatgtcttgttgcaattatttatcaggaatagcttgcaacaaaacatgccaaaaagatgtgaattatcctcttgtcaaagggcttggataaaaatcttcagagttacggtatagctgcaactggcgagttcgcgtattggtctgtatgatcatacatgagagccattctgattcagaataagggtcacttaaatcctgaacgtcctcatttgaaaggattaattcacattctttgtccctaaaatccagccaggctcgctgtgattttttaagcaagttaagttgttcggtatcaggtttttttacacctgtgcgtggcacttgttctatataacgataagcttcaccataggctttatttaattgcgcatcgacgagattgtattcttgtcgcaggcatgatttgatcacgttaatgtcagtatcatcatctgaatttttttgccaacaatctttgatggctgaaatgtcatggtcgttttctataaccgtatcttctgcgtaagcctggcaagagataatgcctaatgttaatacaagaaatttaaacactgcggtattccttaaattcaaccgttatcgtttccctggggccggatattacgcttctggcctcttatccaacagtcagaaaacaatggcatgtccattttcagaatacatttagatggcaataaaaaagcctgatcaggtaaccctgatcaggctttactctcacgaaaaatcgattacatacgctctactgtctcaatacccagcgtatccagacccagctttagcgtcttcgctgtcagttgtgccagtttcagacggctgttacgcacttcttcgttttctgcgctgaggatcgggcagtgctcgtagaagccagagaacagaccagccagatcgtacaggtaagcacacatcacatgcggcgtgccttcacgggcaaccacggtgagggtttcttcaaactgcagcaggcgagctgccagttgcgcttcacgatcttcacggatgattaccggagctgcagccagttgctcttcgttaatttctgccttacggaacacggacaatacacgcgtgtaagcatactgcatgtatggcgcggtattaccctcaaacgccagcatgttgtcccagtcgaagatgtagtccgtggtgcggtttttggagagatccgcatatttcaccgcaccaataccaaccgcgttagccagtttttccagctcgtcagctggcatatccgggttcttttctgccaccagacggcgtgcacgttccagggcttcatccagcagatcggccagtttcactgtaccacccgcgcgggttttgaacggtttgccgtctttacccagcatcatgccgaacatgtggtgttccagcggtacggattccggtacatagcctgctttacggacgatcgcccatgcctgcatcaggtgttgatgctgacgggagtcgatgtaatacagcacgcgatcggcatgcagtgtttcataacgatatttcgcacaggcgatatcagtggtggtgtagagatagccgccatctttcttctgaatgatcacgcccatcggttcgccttccttgtttttaaactcatcaaggaatacgacggtcgccccttcgctttctactgccagacctttggctttgagatccgccacaattcctggcagcattgggttgtagaggctttcgcccatcacgtcatcacgggtcagcgtcacgttgagacgatcgtaggtgatctggttctgcgtcatggtgatgtcgaccagtttgcgccacatctcgcggaaatattcgtcaccgctttgcagttttaccacgtagttacgtgcacgctcggcaaactcttcatcttcgtcgtaatgctttttcgcatcgcggtagaaaccttcaaggtcagccagctccatttcatcaccggcgttttcctgctgctgcttttccagccatgcaatcagcataccgaactgagtgccccagtcgccgacgtggtttgcgcgaatcactttgtgaccgaggaactccagagtacgcactgctgcgtcaccaataatggtagagcgcaggtgaccgacatgcatctctttcgccacgtttggcgcagagtagtcaaccacaatggtctgtttttctggcgtagaaacaccgagacgatcggacgccagcgcctgctgaacatgttcagccaggaatgccggatcaaggaaaatgttgataaagcctggaccggcgatctcaactttgctggcgataccgttaagatccagatgagtcagcacctgctctgctaattgtcgcggtgtcatacccagttttttagcaactgccatcatgccgttagcctgatagtcgccgaactgaacttttgctgaatgacgaacctgcggttcgcaatccgcaggcgcgcctgccgcaatcatggcctgacggactttttctgagagaagagcctgaatattcaccggaataccttacattgatgaagcgagcaaaaattgcccgcaccagttaaagaaattagggcgggagtatactgcaaatggctgttttcgtcagcaacgtgcgcgtggcgtattgccgttttcactattgcatcagaagcggcgtgaaatcagcggttggttggcgcagggcaacagggtaaattaacgcttttactgaaagacgaagagtgattatggcgaactggcaatctatcgacgagctgcaggatattgcatcggatttaccgcgatttacccacgcattagatgaactttccctccgtctggggttgaatatcactccgctgactgccgatcacatttctttgcgttgccatcaaaacgccactgctgaacgctggcgtcgcgggtttgaacagtgtggcgagcttttgtcagaaaatatgatcaatggcagaccgatttgtctgtttaaattgcatgaaccggtacaggttgcgcactggcagttttctattgtggagctaccgtggcccggggaaaaacgttacccacacgaaggttgggaacatattgaaatcgttctgctgggtgatccagaaacgctgaatgcccgtgcgctggcattgctttctgatgaaggactcagcctaccggggatctcagttaaaaccagttcaccaaaaggtgagcatgagcgattaccgaatccgacgctggcggtcaccgatggcaaaacaactattaagtttcatccgtggtccattgaagagatcgttgccagcgagcagtcagcgtaattaaggagcaaaaatggcattactggaaatttgctgttacagcatggaatgtgcactaacggcgcagcaaaacggcgcagacagagttgaattatgcgcagccccaaaagaggggggcttaacgccgtcgttgggggtactgaaatccgtgcgccagcgggtgacgatccctgtgcatccgataattcgcccacgcggtggtgatttttgctacagcgacggtgagtttgccgccattcttgaggatgtgcgcacggtccgcgaattaggttttcctggactggtgacgggcgttctcgatgttgacgggaatgtcgatatgccacgaatggaaaaaataatggctgctgccggtccgctggcagtgacttttcatcgcgccttcgatatgtgcgctaaccctttatatacactcaataatcttgcggaattgggcattgcccgggtactgacatcagggcaaaaatcagacgcactgcaaggtttatcaaaaattatggaacttattgcccatcgtgatgctccaatcattatggccggagcaggagtccgtgcagaaaacctgcaccacttcctcgatgccggagtgctggaagtccatagctccgcgggagcgtggcaagcctcaccgatgcgttatcgtaatcaaggattgtccatgtcatcagatgaacacgcggacgagtattcgcgttatatcgtagacggggcggcggttgctgaaatgaaaggaatcattgaacgccatcaggccaaatgatttttaccgttgcatcatgtcgcccaatatgatgcttgctcgtaccaggcccctgcaatttcaacaggggcctttttttatccctgagcagtataaaaaacgaacgataaccgtgatctgttgagcgggtgacagtgaacatagcgttgtgctaataatattttttatattcacattgattatgggatttaaattgctaaaactgataaatatatattctaaatagcaactgggttattccttagcaattaatgattacattgtaataaatcatattctttatcgattatttcaggcagtgttgtgccgagttatgcaagcggttaattcgttgtgtatttaattatacaatgatttcggtgttctggaatttatttagaggaatctatgcgagggaaaaaacgcattgggttattgtttttgctgatagcggttgtggttggtggcggcgggttattgctggcgcaaaaagccttacataaaacgtcggatacagcattttgcctttcctgccactcgatgagtaaaccttttgaggaatatcagggaactgtccacttttcgaaccagaaagggatacgtgcggaatgtgcagattgccatattccaaagtcagggatggattatttatttgctaaattaaaagcatctaaagatatttatcatgaatttgttagcggcaaaatagacagtgacgataagttcgaaactcatcgccaggaaatggccgaaacagtatggaaagaattaaaagcaactgactctgcaacgtgccgtagttgccattcttttgatgccatggatattgcctcgcaaagtgaatctgcgcagaaaatgcataacaaagcacaaaagggcggcgaaacctgtatcgattgtcataaaggcattgcccattttccgccagaaataaaaatggatgacaacgcggcgcatgagctggaaagtcaggccgctacttcagtgactaatggcgcacatatttatcctttcaaaacttctcgcataggcgagctggctaccgtgaatcctggtaccgatctcaccgtcgttgatgccagtggcaaacagccgatcgttctgttgcagggttatcaaatgcagggcagtgaaaacacgctctacctggcggcaggtcaacggctggcgctagccacattaagtgaagaaggtatcaaggcgctcacggtaaacggggaatggcaggctgacgaatacggcaatcaatggcgtcaggcgtctttacagggtgcgcttaccgatcccggattagcggaccgtaaaccgctatggcaatacgctgaaaaacttgacgatacctattgcgctggttgtcatgcccctattgccgccgaccattacaccgtcaatgcgtggccgtccattgccaaaggaatgggggcacgaaccagcatgagcgaaaacgaactggacattttaacgcggtatttccagtacaacgccaaagatattaccgagaaacagtgatcctcgttgatcagggaggaagttatgacattaacaagacgtgaatttattaaacacagcggtattgccgctggagcgctggtggtgacatcggcagcaccgctccccgcatgggcagaagagaaggacggtaaaatcctcaccgcgggacgttggggagcgatgaacgtagaagtgaaggacggcaagattgtttcttcaacaggcgcgctggcgaaaaccataccgaattccttacagtctacggcggcggatcaggtacacaccacgacgcgtattcagcatccgatggtgagaaaaagctatctcgataatccactgcaaccgacgaaaggtcgtggcgaagatacctatgtacaggtgagctgggaacaagcattaaaactgattcatgagcaacacgatcgcattcgcaaagctaacggaccatcggctatttttgccggatcatacggctggcgctcttctggcgtgttgcataaagcgcaaaccttactgcaacgttatatgaacctggcgggcggttattccgggcatagcggcgattattcaaccggggcggcacaggtgatcatgccgcatgtggtcggttctgtagaggtgtatgaacagcagacctcctggccgctgattctggaaaacagccaggttgtggtgctgtgggggatgaacccgctgaataccttaaaaattgcctggagcagtaccgatgagcaagggctggaatacttccatcagctgaaaaaatctggcaaaccagtgattgccattgatcctatccgctccgaaaccatcgacttctttggcgataatgccacctggatcgcgccgaatatgggcaccgacgtggcactgatgttagggattgcgcataccctgatgacacaaggcaaacacgataaagtgttccttgaaaaatacactaccgggtatccgcagtttgaagagtatctgagaggtaagagcgataatacgccgaagagcgcggcctgggcggcggaaattactggcgtaccggaagcgcagatagtcaaactcgctgaactgatggcggcgaatcgcacaatgctgatggcaggctggggaattcagcgccagcaatatggtgaacagaaacactggatgctggtgacgctggcggcgatgttagggcagattggtacaccgggcggcggttttggtttctcttatcattactccaatggtggcaacccgacacgtgttggcggcgtgctgccggaaatgtctgcggcgattgccggacaggccagcgaggccgctgatgatggcggaatgagggcgattcctgttgcccgtatcgtcgatgcgctggaaaatcctggcggcaaatatcagcataacggtaaagagcaaacgtatccgaatatcaaaatgatctggtgggcgggtggcggtaactttacccatcaccaggatactaatcgtctgattaaagcatggcagaaaccggagatgatcgtcgtttctgaatgctactggaccgcagctgctaaacacgcagatatcgtattaccgatcaccacatcgtttgagcgcaatgacttgacgatgaccggtgattacagcaaccagcatattgtgccgatgaagcaggctgttgctccgcaatttgaagcgcgaaacgattttgatgtgtttgccgatcttgcggaattactcaaacctggcggaaaagagatctataccgaaggtaaagatgaaatggcgtggctgaaatttttctatgatgccgctcagaaaggggcccgtgcgcaacgcgtcactatgccaatgtttaatgccttctggcagcaaaataaactgatcgaaatgcgccgcagcgagaagaacgaacagtacgttcgttatggtgatttccgcgccgatccggtgaaaaatgcgctgggtacgccaagtggcaaaattgagatttactccaaaacgctggaaaaatttggctataaggattgcccggcacacccaacctggcttgcgcctgatgagtggaagggtaccgccgacgagaagcagttgcagcttctgaccgcacatccggcacaccgtttacacagtcagcttaactatgcggaactgcgtaaaaaatatgcggttgccgatcgtgaaccgatcactattcacaccgaagatgctgctcgatttggtattgcgaatggcgatctggtgcgtgtctggaacaaacgtggtcagattttgacaggcgcggtggtgactgacgggatcaaaaaaggcgtggtatgcgtgcatgaaggtgcatggccagatctggaaaacggcttgtgtaaaaacggcagtgcgaacgtgttaacggcggatatccccagctcgcagctggcaaatgcctgtgccggtaactctgcgctggtgtatatcgaaaaatatacgggtaacgcaccgaagttaacggcatttgataagcctgctgttcaggcgtaagaagtgaatagcgcccggaaacgggcgctgaggttatgcaaacgtaaaactgcctgatgcgctatgcttatcaggcctacatagtccctgcaatagattgaattagcaagggtttgtaggccggataaggcattcacgccgcatccggcagtaataccagacctttacggcttgcgcgcaatcagcaccgcgcgtttaggcgcaggataaccttcaactgtcttactcggatcatgtgggtcgaggaaatcggacagagattcggtaaccatccattcagtgcgtcgctgctcttcagtagtggtaacgcacacatccacaatgcggatatctacaaaaccacacttcttcagccagtttttcagcgccagcgcggaagggatgaaatagacattacgcatttgcgcgtaacgatcgcctggtaccagcaccgtgttctcatcgccatcaataaccagcgtttccagcaccagttcaccctcattcaccagttgatctttcaactgccagagatgctccagcggcgaacggcgatggtaaagcacgcccatcgaaaagacggtatcaaaggctttcagtgccggaagctgttcaatacctaacggtaacaaatgtgcgcgctgatcgttacccagtagtttacgcaccgcttcaaactggcacagaaacagttgcgtagggtcgatccccaccgcgaggtgcgcgcctgcgccaatcatgcgccacatgtgataaccgctgccgcagccgacatccagaatggtgcgtccggttaaatcagaaagatggggcagaacacgatcccatttccagtcggaacgccattcggtatcgatgttgacgccatacagtgagaacggccctttgcgccatggcatcaggttccgcataagcgtttcaatgcgtttaatttgcccggtgctcagtggctcttcgctttcggcggttacgctatgcaataaatccagacgatacggtttaatttcaggcagaaattccaccgcgttggaccactgcttaaacagcccgtgctgctgctcgcgctgccagttagcaatctgcgcgggcagcgtttcgagccagtgtgaaagatgatttttggcaatcagagaataaaagttaccaaagtcgatcatgcagcgtcctctgcttttaatgccaccagtgaaccaaagttaaagcactggaaccacagctcgctatgctcaaaaccggctttatgcaggcgtgctttatgggtttccacggaatcggtcagcatcacgttttccagcatgctgcgcttctggctgatctccagttcgctgtaaccgttggcacgtttaaagtcgtggtgcatgttgaacaacagttcaccaactttggcatcttcgaaactgaatttttccgaaagcaccagcgcgccgcccgggttcagtccttgataaattttatccagtaatgcctggcgctcggaaggttccaggaattgcagggtaaaattcagcaccaccatcgatgcgttttcaatggcgatatcgcgaatatcaccttcaatgacgtctactggcgtaggggctttataggcgtcaatatgacgactgcagcgttcaatcatcgccggggagttgtcgatggcaataattttgcaattatcatgatgaatgttgcgacgcaccgagagcgtcgccgcgcccagagaacaacccagatcgtaaacctgcgtaccaggttgaacgaagcgctcggctaacataccaatcatggaaataatattggaatagccgggaacggaacgctggatcatatccgggaagacttcagctacccgttcatcaaaggtccagtcgcccagtctggcgataggggcagaaaatagcgtgtcgcggtgagacataacgtaaaaatccgggaaaaagaaagtggcgtattgtgcgctaacgcagggagaaaaccaactcccagggcatataccaaagattcgccagcaccatcagcaacagcgcacaccaggtggcgctcatgccggaacgtcgccagcgaaacagacggtgatgaaaaccgtaataatgcatcagacgaccagcaagcaaaacgatgccgcaaatatgcaccatccaggtttctgcgccattcatttccataaacagcatcagcacaatcgcgatgggaatatattccaccgcgttaccatgaatgcgaatagcgctttgcagttcgctaaaaccaccgtcaccataggcaacgcggtactgcattcgcaggcgaacgacatcaaaagagaacttcattaataacaacgcacttaaaacggcatatagcgcgcttaccatacaaactccctttaaaatggccgatggcacctgtctatgataggtggcaaattcagaaaagagaagattgctgtggaatagccggaactgctccgatctctggaagcgttttacgtaagtcttcccacagggtatgtaccagttccggggcctgggcaatgtctggcgtatgtaaaaaaagataaggcgtagtggtctgatgccactgcgctaatttctgtaaccagacctgaaataattcccggttttgcgtcatatcatcactaccgataaaacgaatcagcggatttgtcgccgtcagtacagcatgtaccggaactttaggtttttttcgttgagcgtcgcgaatagcttcactgtgtggacgtgctgcatgaacagggcggctgtctaaaatcatcaaggtctaaatacactatgaggttgattaggggttggtacaagcccaactaaccgaatcaactatgaggatgattcctagaacatccgaatcaactacctgtaaaaacaggacaatatcaggtgaatgactatgcaatttaacggtgtttttccaagtatctatgcaatcctacacaaattctatgcagtatcggtatagtctctttttagcataacttattgaaatatataaagaatctgtgaagtctcttttcagggtaaactgtatcgtgttagtcgtccctctccagacactacatatagtgctatatacaggactatataacgatatatagatagttggtcacatggtgtaactatcaagaaacttaacgatttcctacgtgaaagttagaaagtgatggttatagttaccctcctgaatcttcatagcgctctattaaccagtctcataaggaagtccttttgagacactttcaacgtaacggtagaatgcaccctcaagtagtctcaaaaggttgtttttggattatgagacagctaaacttatgagactaacttttgagacttctaaggggaacattatggcgatacttggatattgcagggtgagtacagatgaccaatccatcactaaccagcaaatgcaaattgaagaggcagggtacaacattgctaaatggttcgctgatgaagctgtcagtggttctgtcaaagcttctttaagaaacggtttcagcagtttgttagcttatgcacgagaaggtgacaccgtagttgtggtagctgtagaccgtcttggacgtgacacaattgatgtgttatcaacggttaaagcgctacaggctaaaggtgtgacagttatcagccttagagaaggatttgacttatcaagcgctatgggtgaagcaatgttaggcattatgtcaacgttggcacagcttgaaagaagcttgatagcagagcgtagaaaggctggtattgaacgtgctaaagctgaaggggtacatatgggaagacctgtaaaagcttcttcagaggctgtacagatgcttatttcacaaggtaaaacgaggttgcagattcaggaagagctaggaatctctagagcaacttattacagacttgctaaataagttactgaatagttacatggatgtagctgatatttggcttttttgccaagggggtcacatagctggtgtgacgggtactaaacacgtatacatcatgaggtagattctaccgaatcaactagacagatattttcgaagattcggggaagatgagattcaaagagggctagtcattttttataaaaattttcagactctgaaaagttactgtacagaatatatacagatatctttaaagtatctgtaaaaacttttaagataaaagatagatatcccagaaaggatatccgtttagaaaacctgttaagtatctcttaaaagagagtaaaccttgtcaagagtgattgcaataaaaatttttatttcttatgtcaattgagcatattttaatcgggaagcatcatgggggttctgattactggagaactccatttttgttatttaagaacttacaccgtgaatttattttcagtctagatggtgctgcaactgagcatgacacgctgttaccacgattcaccgatgatataagccgtcaatcatgggttagtgaaaaggtcttctgtaacccgccgtacagcgatattccgtcgttcctcttaaaagcgtctgaagcggatttagtagctttcctgataccgcatagagccaacaccagctactggcttaggcacatttacagcaataaccactgtcatgaaatccgtattcttcatcgtgcagttaaataccttccaccagcagggcataacaggcttactattaggtcaccgtttccaagtgcagtcgttgtttttaaaaaagaaccacgtaagcatgaaattacacagatggtttgctgtgctgatacattgctaccgttaaccatcattaaccgtggtggactaagaggaagacccaccatttacccacctgagacgctcgacagcttcataaaactatacaggcaaggaaaacccattaagtacattgcagatgctctcagaatgcctctgagcacgtcatacaggattgctcaaaggttgagctaaaattctcataaatatggtcatttacaagacaggtgattcagatgttaagaagtatccctgtgaacaataaatgaccaatcagtaatcattctgtgaaataattgttgcaatttataatcacatctgttatagtttctatatgggctgataaaaaagttcatgtcttgaagtggtaacacttggggaggtgtcagatggttggcgtatattaacctctcattcagggtatacctcagcgttttaatcatcgtactgtttcaggcatggacttctttatcagtccatcaatcccccagatattttaatcacacaggctaatcggttttatccggttggccttttcacgtatgaggtaatttatgaatgtctaaatataacccaaatcagttttataaatttgatgtgcgaatctctcaactttcagaagaaattaacgcagcagcaagattgatttatatggtcatggtccatagctgtgacttctatgaagagaaatacaaatcatattcaccaagtattgaccatctcgcttatatggctggtgtatcaaagagaacagcaatcagagccattgagacacttgagaaacacggtttaattcaggtgcaaaagaatcaggggcgtcaaagcacttatcgtgtattcacactggatgataagccggaattacttgtaagacctacatcacaggaagttgcagcctcagtaagacaaaatgacaccactaccagtgacaaaatgtcatgggggtagtgacaaaatgtcacccgtgttagagagataagttattagataaaacattagataataatattacagataagaataaagagactggacttaatgatgatattaaagaagatgactttctttctttggatgaattaaatgattttctctctatgaatgaatctgaccttgaagtaagctctaaaaagacttctaaacaagacagagaaatcactgatgtgagtgttgatagtgaccataaaaacacacagtgccccgccactgatgatgagttggaccccttcgatgatgaagaggatgaacgtgaaaaagccattaagagggcagagaagaaaaagagattcgagcttgcaagacaaaagaacaaagtatcgggtttagacccattcgatgacagtgaagatgattattatctttcaccgaaaaagaaacaaactcaggatgacaagaagcaaaaaattaaaccgaagatgtattttgccggtggaggaattaagtaatgaaagaatatcacggtgaaaagagatacaaagattacctgttaaagcgttacagcatttctcgtgaaggtcatcttatgaaggatactcacggggaagtttaccggattagaccaaagaaagaagggaggggttatttcttttacgatggtgtgacagatttaaagattgacgctttgaggtttgcagtgctgtatcattttgatatctggaattcaatccaccagctacgattaaaagacggtgaccccagcaacttaaaggccaccaatattatcacaaaacgttagtttgttttaccatcatcaatcgtaattgtgatttcatatttgaaaagcttaatgctgaaattgaatcgtgtacttctggcgataatcatttttaaaagctgatacacaagaagcaccagaaacacaaagcaacctaagcttgcgaatctgtgagattcagcaattgtttcaagaaagcccattaattccccttatttatcaaagggaatgacctgtatcagccccctacaaccatattaacatgtaaatgagttgttgacaatatgttataaatatgttaaagttagttataagtcaaagattttaagaaggaaaatttaatgagacacacagttacacgccttttgccagaggcatattccagactggcagcaatcaaagacaaatacccagccatgagccacacagcacttgttggtgagattctgaaggaacacacagcccttacaccgtttgacgctatcaagggcgttgcagagggttctaaggccatcagaatcacaacgggccaactggaactactcaaagcacagtccgcagtggcaggttgctcaatgattcaggtgttgagtgccaaggttcatcaactggcggataagctgggggtttaatgctatgcacatttgattatcatgcgttttatcgccatagaggtcaccttgtccgtgagaataacggaacatggaaagatttaactcgtaatgctgaacccttcacacaccagcaattaaaatcccgcttctccagatggaagaatgcaccagcagatactggtgattttgagattatccataccttcgattatgcctcagaagatgaccttcacgatgcaattaagctgattgaagacttcaatacctcagaagatgtggatggtgacaaatataaatcccgtggtaaccgctataaccgtgatgatatcactcaggccataaatgctggtcaatctcagcgatacattacagaaaaatatggtatttcacggagacagtatttctacgttaagtcattgattaataaagacaattaaaaataaccatctaagaaacggtagaatgcactttacaggcagagttgcaccttaatttgataaattaccttaccagccagtgcaactccctctgtaacccgcatggttactggcctcagaatggctattttaagaggtctgaggtgtgtttcataggagatttaaaaatgaataattacccaatgcaaattatggttgataacgacactgctatgatggtgcaaagcttcattgatgcaggtatcgcaattaattttgataaattactaaagctgatggctgataatgcagaaaacatctctgactttattcagtcggtggagtttaacgagcctcgaatgatgctaccaattacagacagcaacatgaaaagattggttatcgagcaaacgaacatatacagtatttccccagagcaatttttgaaaggtgctgtgacaatcctgtacagtgataatattctggtgacggattctgtgagggttcactaatgggtttaataattgcttggacgttgcttggcttatttgttggttgcattattaacaatgcggtaaataagaattgatgttatcaacctgttaaaaagctgttgacaaataaccttaagcatggcataattttaattatgggagagcaattctctcttatttttctttcaataatccgatggatggatattctgagttggaaaggtgcaatgcttttcgtcatggcctttcaggttagtctgagaggctatctcaaaaagtactcttgttcattcattattgaatcctttgcccttcacagaaatgtttagggctttttcagtttttaaaagcacacttggcaggttcttgttcagtcagactcttcacctctgattgctgagtgtgcttctataaattgaaataacaaataaactaaggggtgaacgaatgattagaaatgaacatgaaatgcttatcgaacacagaccaagtgcacttgatattcacgaattaactttgcgtgaatcttttgatagagcttggcgggaatcacacgaagtaaataaaggtccatatattccaccagaaccactcgagattccaagagttgaaattgatttttctatgaacgaacggtgtgaacttgatttgaagttgaagctacaacgccgatatttccaagctattaaagactctcaagaagcaatgagaagtgtttacgagaaaattcagtccaagcttgaagacgaaattgacgaaatggttatttcgatggagcttcaaaccaattcttatgcttgtttctctcgactagaccgtgacggttgggggtatgaccctgtagagattggtaaagtgattgcagatttaccagaaggtcaaagagttgttcgtacagaaagagctgtcagagcaccacatcgactgtctctaattgttgctgataaatcacaagctgagcttgaagaaattgccaaagagaaactgatgaaagcaagagaaaatgagattaatttgctgaaatcaagactggctaagctgattagtgaggtagcctgagtttaacggacactccttcctgaaatagaatggcatcagaaggagctaataatgagcagaaaaacccaacgttactctaaagagttcaaagccgaagctgtcagaacggttcttgaaaatcaactttcgatcagtgaaggcgcttcccgattatctcttcctgaaggcactttaggacaatgggttaccgccgccagaaaagggctcggtactcctggttcccgcacggtggctgaactggaatctgaaattctgcaactgcgtaaggcgttaaatgaagctcgccttgagcgagatatattaaaaaaagcaacagcgtattttgcacaggagtcgctgaaaaatacgcgttaatcgaacaatggcgacaacaatttcccattgaagcgatgtgtcaggtatttggtgtatccaggagcggttattacaactgggtacagcatgaaccctcagacagaaaacaaagtgatgagcggctaaaactggagattaaggtggcacatatccgcactcgcgaaacatatggaacccggcggctccagacggagctggcagagaatggcatcatcgttggtcgtgaccgactggcacgtcttcgtaaggagctaaggctacgctgtaagcagaaacgcaagttcagagcgactacgaactcgaaccacaatctgccagttgcgccaaatctgctgaaccagacgttcgctcctacagcaccaaatcaggtctgggtggcggacctgacgtatgttgccacacaggagggatggttgtacctcgctggcatcaaagatgtttatacgtgcgaaattgtcggctacgccatgggagagcgcatgacaaaagagctgacaggtaaagccctgtttatggcgctcaggagccagcgcccacctgccgggctaatccaccactctgatcgaggttcacagtactgcgcatacgattaccgggtcatacaggagcagtctggtctgaaaacatcaatgtcgcgtaaaggtaactgttacgacaacgctccgatggaaagcttctggggaacgctgaaaaatgagagcctgagccactatcgttttaataaccgggatgaagccatctcagtaatacgggaatacaggtaatgactccaacttattgatagtgttttatgttcagataatgcccgatgactttgtcatgcagctccaccgattttgagaacgacagcgacttccgtcccagccgtgccaggtgctgcctcagattcaggttatgccgctcaattcgctgcgtatatcgcttgctgattacgtgcagctttcccttcaggcgggattcatacagcggccagccatccgtcatccatatcaccacgtcaaagggtgacagcaggctcataagacgccccagcgtcgccatagtgcgttcaccgaatacgtgcgcaacaaccgtcttccggagactgtcatacgcgtaaaacagccagcgctggcgcgatttagccccgacatagccccactgttcgtccatttccgcgcagacgatgacgtcactgcccggctgtatgcgcgaggttaccgactgcggcctgagttttttaagtgacgtaaaatcgtgttgaggccaacgcccataatgcgtgcagttgcccggcatccaacgccattcatggccatatcaatgattttctggtgcgtaccgggttgggaagcggtgtaagtgaactgcagttgccatgttttacggcagtgagagcagagatagcgctgatgtccggcagtgcttttgccgttacgcaccaccccgtcagtagctgaacaggagggacagctgatagaaacagaagccactggagcacctcaaaaacaccatcatatactaaatcagtaagttggcagcatcaccgggaatacattgagattttctacaatcgtcagcgtcgtcactctcgtctggggaatatctccccggcagccttcagggaaaaatatcatcagatggctgcttaaaaaaagaacaaatggtagtgtccgctattgccagtacacctcagggtataaggggttatggccaccggactaccaaacggctgccagccctctttcagtttatgtgtcagcttttccgcaagatctgacggcggcgccgccctgacaacatcatagtgtttaaatgccatggttctttccaccatctgaaaaataattctttaaaatacctgacatgtaatacagaaaaaacacaaaaccataccttaaataaaaacctgattatcaagcagatatgcatggataaactacaagacgagatataaaccaccctgcatttaaataaacaataaacaacatcagaaaaataattctgctctatggtttacattcaaaaatatcatttatacttttcagaacatcaccagcaaggcataaacaaggaaactaaatgaagtggattgtgattgatacagttatccagccatcatgcggaatatctttttcagtcatatggagtaaaataaaattaataatctggtatcaatcggatgctttcttacctcctgaaagtatatttacactgactcacacaggcatcatgctcaataacaaagtgctacctgtaaccatttacaacgtagtaccattcaataaaacattctggaattcaatcaaaaatagccaggaatgccctacaaatacagataacgtattgaatgaatgctttaataaccgttgcactctgcaaatatgtccttatggactaaaacaacaaagtccataaggagtttactcacatctgacaaaatcaatataaacagcccctccggagaggggctggagagtggcgctatgtgccattgcatggtgccgggtgcctcccggtgaattcagtaccagcacctgaatccgcgattatcccatatacctactcgctgattgcccctccgcacagggggattcaccatgccagtttcttttaacaaactccccgcaaaccagacaacagtcaaccgcctgaattgtgaagtatttaaaaatttctcccgctaactgatacccggctaacagtctggcgttttctttttcagcaacgggaaagcaacaaccaccacacccgccaccagcacaccgtcagccagcactgacattatccggctgctgcaatgccattcacaaaaacagtaagcaatcactttttaccgtaacaggtgataatccagatatgtatctaccccagatgagtaatccgaagttcatccataccacaggtcctggctattctgttgtactcctgaacaagagcaaataattctgaattagcaaccatgaactcatcgcaaaccctctgtatagcatcactattcagaataataacgtctcttcccgaaagacgatcaggagtacagaacaaaactgtcaaacggctgaaggcctttgctcgtgctgcattgactatatcaatacgctgcctaaggatgaaacaccccgacgcctcatcaatattcactctacccacaccatatgaatgataaatatttaatgctgaaaaaaccattagaccgtataacaaacactcaatcaatacttaacagaacttttatttttgacaaacataaaatattttcaacaatatcctgagccaggtatatttcagtataaggctctgccggaaggaatctggaagaatgaatatggcgcgctgtactggattcgaaccagtgaccgattgcttagaaggcaattgctctgtccggctgagctaacaacgctgaataccgataatggaccgccatcggggacccgcccccgcaccaacaaccctgttatcatgtcgtctgctcttcctgataagctaatggcggtttgtgatggtggcccttgctggatttgaaccagcgacctggcgattatgagtcgctcgctctcaccactgagctaaagggccgggagcagaataataacggtccgtaattaattccgcaataaaaaacccgctcggcggcgggttgtagaaactcttctaacgtcaggcataaaacgcccatagttatgacgaatttaccacagattccggaaaaatcaacctagttaccttttttaactgccgctcagcccatgcttcttcaatatcaaaccgggtcaccagcgcatcatagaatttcttaactgttttttcccatgacgcgcgtgttatctggtttgtcacctcgcatatagcattaaatgcctccgttgatggtagtctttcatagccacgaccaccacaacgctggcagtctctgataacaggcataccacgttttaccgactcttcacgatgaatggcgacaccacgcccacggcaatccttacaggcggtggaaacctcaccctttccgccacactccggacaggcaacttttaccacctccctgacttttttccattcttcccagtaagacggatacacacctttcgtacactttgcccataccggcggcttaccatccggatactggaccttgtttgtaaaaactacgctttcaataaatttttccccatagcaacaagggcactgctttttactcgctgcgctgcgggcataatcctcaaaagcgtacgaagccataatgcgcatcactaccggttttatttctgccggaagttttctcaacgccgccacacgatcgcaccgactgagtgcataatctgccagtaattctgttgcccgcgccctgtcattcatactgatgcccattttccccaggaacgcagaaaaccccatctcagcccgattctgtgtcatgccctgcgcggccatcacatcagtgatactcagcgcatcttttgacgttgaggccgatgcatcggtcaggcaaggggattttggggagtagtatttcggtaaatcttccagtttcattttttgacctgctcttcatgcattatggggtaaatcttcacccccagacgtccaccagatactggctgaccacgaacgatattgatttcatcaaactgctcatcgtccattaacactcccgcatgtgtcagtgcatccagtggtgctttcaggatattgtccaggtcacgacggcgcttatccggtggctctgcaataatctttatcgccagtcttccggacaggcttaatttcagtcgctgctgacggacaataagcgccacatcccggcgataacgctcaccggcttttgatacaaaatatgtgttgtcacgacgtcgccagtaagtattcaccgtcggcggataaggtaaaataaactcatggcgcatcagcgcagcacctcctgcaccagtttttcaaactttccgactctggtttccagctctgccacacagtccaccagctcatctactgctttctgtgcgcgatgcttcgcctgcatcagttcccgaagcgcgggtaccatatctttacggatagcgtcttttgttatgcccgttttttcgagttgttcagcatgacgcagcatttcctgcgcgtgtttacgcaattgttcaggggtaaaagtcattgtctggttgttcaaaagaaacgctccatcttactgctgtcagttcgtttattactgtatctgcgcggattgccgggcttcatgggagtggaaagcacccgtgcactttcctggtccacaggcagaaaatgtccgtagactggccccctgaatctccagacaaccagtatcacttaaataagtgatagtcttaatactagtttttagactagtcattggagtacagatgattgatgtcttagggccggagaaacgcagacggcgtaccacacaggaaaagatcgcaattgtgtcaacgccacgatgtttgaccgttatttgccattttcatgcccgctaaatactttcgttactgatgctgtccgctttccaccatttcatcatcactgattggcgttgtgtttttggtcagcactccagctttacgtttctcttttaaccggtaactctctcctttgatattcagcgtggttgagtgatgtagcagccgatccaggatcgctgttgccagtacgtgatctccgaacatttctccccagtctgcgaaccctttgtttgacgtcagtatgatgctcgctttttcatatcgacggttcagtagccggaagaacagactggcttcctctctgttcatcggcagatagcctatttcatccaggatcaacacccgggcataactcagttgctgtagctgacgctccagccggttttcctgtttcgctttcatcagtgtcgcgatcagtctgtccagtggcataaacagtacccgatgtcccgcatccaccgctttcacgccaagagctatggccagatgagtttttccgacaccaggagggcccagcaggatcacgttttcgctgcgctccacgaacgccagaccagccagttcccggacaaccttacggtcgatgcccggctggaaggtaaagtcgaactgctccagcgttttgacccacggcagacgagcctgcttcagcctggactccataccgcgctgatgcctgccgttccattcctgctgtagcgccatgcacaggaactcccggtagttcagctcttttttagctgcctgttccagcaggctttcaacgtgataactcagatgctccattttcaggcgactcagcaggacttccagttcatgcatcacaacagctcctcataggcactcagtggtcgatgttccacctgactgacctgctgccagagcggggcgtgatgctccggcactgtctgccagccagacgatgctgaacagaggcgatgtgaggccaccagtttctcattactgtagatccgcaactcgtcatccagcgatattcgtatcgataccggctgaccacacagcgcttcgggaacgctgtaacgattaccaccaacctcgatatagctgtcccaggacacatggcggatatcgaagtaactggtatcgaagtctgtatccggtaacggctgcagatgttcctgctccagcgcgaagcgctgttccggcgtttctttgaactggcgaagctcccgtttgtcagccacatcggctatccattgctccagttgttgattgacatgagtgaagctgtcgaacctgcggtaccggacgaagaagttctccttgaggtatttcaccatccgctcaaccttaccttttgttctggccctgcgtggacggcatgcccgtggcaggaagttatagtggtcagccagcaacaggaatccggagttgaacacgactttcccgttgttattcttcagcaccgcagccttctggttatcaaccagcaccgttttcacacaaccaccgaagtagcggaaggcgcgaaccagtgattcgtaggtatgctcagcatcctgttttggtgcggcgaagacatggaagctgcgggagaaccccagcgtattaaccgcaaagttaactttgcaccgttgcccggcaacctccacctcaacttcgccccagtcatgctggagctggtatccaggctgagtttcgaagcgaactgttctttttgacggacgcattttacgtttgggctggatgtagtaacgcagcatggaacgtccgcccgtataacccattgccttaatctccgcgaagataacctcgctattccagacattctctgccaggcgcatgtcgatgtaatccataaacggtttcagcttaaccattttgtggcgggtctttctggctggcggttcagggtatttgaggtagcgtctgaccgtccgttcagagcaaccaatctgagtcgcaatatcgacgatgtacgcgccctgctggcgcatttgctttatcatgtaaaagtcctctctgctcagcatgttgatgtcctttctggtgtgagaaccttaaggaaacaacatggtgtagcagccagccagttatttctctggcgtaagcaataccaggaaggaagtcttactgctgtggccgccggagaacaggttgttcctgcctctgaacttgctgccgccatgaagcagattaaagaactccagcgcctgctcggcaagaaaacgatggaaaatgaactcctcaaagaagccgttgaatatggacgggcaaaaaagtggatagcgcacgcgcccttattgcccggggatggggagtaagcttagtcagccgttgtctccgggtgtcgcgtgcgcagttgcacgtcattctcagacgaaccgatgactggatggatggccgccgcagtcgtcacactgatgatacggatgtgcttctccgtatacaccatgttatcggagagctgcccacgtatggttatcgtcgggtatgggcgctgcttcgcagacaggcagaacttgatggtatgcctgcgatcaatgccaaacgtgtttaccggatcatgcgccagaatgcgctgttgcttgagcgaaaacctgctgtaccgccatcgaaacgggcacatacaggcagagtggccgtgaaagaaagcaatcagcgatggtgctctgacgggttcgagttctgctgtgataacggagagagactgcgtgtcacgttcgcgctggactgctgtgatcgtgaggcactgcactgggcggtgactaccggcggcttcaacagtgaaacagtacaggacgtcatgctgggagcggtggaacgccgcttcggcaacgatcttccgtcgtctccagtggagtggctgacggataatggttcatgctaccgggctaatgaaacacgccagttcgcccggatgttgggacttgaaccgaagaacacggcggtgcggagtccggagagtaacggaatagcagagagcttcgtgaaaacgataaagcgtgactacatcagtatcatgcccaaaccagacgggttaacggcagcaaagaaccttgcagaggcgttcgagcattataacgaatggcatccgcatagtgcgctgggttatcgctcgccacgggaatatctgcggcagcgggcttgtaatgggttaagtgataacagatgtctggaaatataggggcaaatccagtccgttataaaaacgccggtaaatcgttcccagagaaccgtgaggtagcctgagtttaacggacactccttcctgaaatagaatggcatcagaaggagctaataatgagcagaaaaacccaacgttactctaaagagttcaaagccgaagctgtcagaacggttcctgaaaatcaactttcgatcagtgaaggcgcttcccgattatctcttcctgaaggcactttaggacaatgggttaccgccgccagaaaagggctcggtactcctggttcccgcacggtggctgaactggaatctgaaattctgcaactgcgtaaggcgttaaatgaagctcgccttgagcgagatatattaaaaaaagcaacagcgtattttgcacaggagtcgctgaaaaatacgcgttaatcgaacaatggcgacaacaatttcccattgaagcgatgtgtcaggtatttggtgtatccaggagcggttattacaactgggtacagcatgaaccctcagacagaaaacaaagtgatgagcggctaaaactggagattaaggtggcacatatccgcactcgcgaaacatatggaacccggcggctccagacggagctggcagagaatggcatcattgttggtcgtgaccgactggcacgtcttcgtaaggagctaaggctacgctgtaagcagaaacgcaagttcagagcgactacgaactcgaaccacaatctgccagttgcgccaaatctgctgaaccagacgttcgctcctacagcaccaaatcaggtctgggtggcggacctgacgtatgttgccacacaggagggatggttgtacctcgctggcatcaaagatgtttatacgtgcgaaattgtcggctacgccatgggagagcgcatgacaaaagagctgacaggtaaagccctgtttatggcgctcaggagccagcgcccacctgccgggctaatccaccactctgatcgaggttcacagtactgcgcatacgattaccgggtcatacaggagcagtctggtctgaaaacatcaatgtcgcgtaaaggtaactgttacgacaacgctccgatggaaagcttctggggaacgctgaaaaatgagagcctgagccactatcgttttaataaccgggatgaagccatctcagtaatacgggaatacattgagattttctacaatcgtcagcgtcgtcactctcgtctggggaatatctccccggcagccttcagggaaaaatatcatcagatggctgcttaaaaaaagaacaaatggtagtgtccgctattgccagtacacctcaaggccactgcggaagacgtgaaaagcacggggaaaaacgccgtcttatccggtcagcgtgcacaggcagccgcaggttatgcccgcgcagcagaacaggccaaaaatgacattgatgctgcgctgaccggcactctgaaaacggctaaccatctgtctgaaatcgcagcagcaggcgaaaaggcacaacagaagtcccgggataatctggggctgaaaagtgcggccacgatggaagcacagagcgacatttacgaccggacaaaaggccgtctggcgatacccggcgcattcggctttgggtgtgcttttctgcctgaagatgttatccgttttgacactaagagtgatttcctggcctgggtaaggaatgcgctgccaggtgaatattccgttgctggcccctacgacatcatcatacccgacacacggtttgaaggggtgctcagcatccggtggactgatgcacgccctgagacaacagaaccgcggtacagagccaaatcccttactttttacggcattaacggccccatttatcacacccgctactgctactggcccatatccagactgactggctgggtgaaaataaatataaccacagaagatattatttacagaatcgtggcgagctctgtccgcaacagatggggagaccctgacattggcgggctgattattgctgcgtaccagggagaagctgacggtgataaagtcatcagacttgtcagggggcagtcatacagaggctcacgactgggaccggtggggatttcagtgcccagtactcccaccggaacgtatatagcatccccacaatttttcattacgggatgttcagagcattcattaccggggtcatattgcgccctgtccggggtgccggatgcacatgtctctggcgcaatgcccgggctttttattcgcacatcgtgaggaatgcaccgtggaaattaaaaaaatcattaatccccgttataccgaaagtggcgcagtagactgtgacgttttttttgacgacagggaccaggcagtcccctacacagccaccgctgatgatgtcgcaccgacgggtcagcaaatctggcaggaactgcaaagtggcaaatggggtgagatagccccattcactgtgacaccagaaatgctggaagcggccagagaggccaggcgtcaggaaattgaagcatggcgcgcagaacaggaggcgaagccgttcacgtttgaatggaacggtcgtatctggaatgctggtcccgactcactgggccgcctgtccccggtagtcatgctggcaaaatctgtcacagcacaaacacatatggcgtggagcgatgccgataatcagcaggtgaaactgtcgatgccggaactggaagaactggcggcagcaatggtgcaggcgcaggtcgatcgcaacgatgagatttatcgccgtcagcgtgaaatgaaagaggagctgagcggtctggatgatttggcttcaattcgggcgtttgacgttgagtaatgaataagccgcaactggcggaatcacagaagaccgctttgcttaccgaagcggagtctgtcatccggccgcgggggcgtgctgtcaggctgaacagggaaacggatgaatccggggaggcccgggggcgggcctctgtttttccggagtcagtccggtctgtggtttatgcaatgtgattatgaatggtgcagttgtgagccgttttcaggcaatcgcagggccagtacctcgtcagtcagctgacggtaaatctgctgttcagtctcacgcatcacctgtgcaccggcttccctctccgcatccgcatcaccgctcagacctgatgctttcagccggtcagccaccctctgagggtactcattctccagcatctcatatttctgctcttctgccagcgcccagcggtcagcttccgtacgcttcagtacagcatgccatggtccccagagggagaaccagtccgtaaattcattctcttcacggcttctgaccatggcttcggcagtgcggaggtcatttgctgtcactcccgacacgccatagaaacgcatttccttcacggcagtggagagctgaagtttctctgcgagcatggtctggaaggccaggtagacttctatctcatccacaaaatggagagttctgactttatcccgggcaatgtcctccagaatttcgaggcggaacatttccctgcccagggagagcagagcgccggtatcattatcgaaaaggccttcagatgcctgatggaccaggagggttttccggagattgttccatgtgagcgcgacacggtcctcacagctctcagtggcatcagcagcaacagcgaaagactgctgtcgaagctccgcagaggcactgagtttttccagccatgcagcgacctgttcacggaatccggaggtattgcgtgcagagacggtatcggaaaggcggtcaaggaacgcggaaaaggtgttggcatgctcttcatgttcaaaagcatgccatatctgtgatacatcagattgtttgttttccgggaaccatgctgtcacggcatcagccagggggcgatggagtgtattctgttgtccgtcactcatggagaagtaaatctgcgggccgtggtagtccggcgaagaggttaatctttgcagggattgcagagcatgggatgacaatgggttatcactaatatctattgaacattcattcctcagattaagaatgctttccgggatatgacttatctgatttatgtcaaaataaccgttccttaaattttccggcaggtatggaatatcggttaacatattgtcgattgcccatatggagtgaatgttgtgaggtagaggggggagttcactaagaagattccctattgcgctaatctcttgtaaagaaaatggtaaaggtggtaaaactgccagcccattacatgatacatctaatgtttccagtagttctggtaaaacaggaagagaacataattgattatttgagacatgaagctccttcaaagatatggggagtgtgggtagtgtgattagttgattgtgggacgcattcaataatttaagtccttgaggcaaagcaggcagttcaataagtctgttatagctgacattaagctgtgtaagggacgcaggcaatggggagattaagcttaaattatttttacttatattaattgatttaattcccggggggatttcaggtaatgttgtcaggcctaattcagacaagtccaggttcgtctcttggttttgtagacatgatactagtcgctgaaaagcgatgtctcgttgttcttcttgtatgcggttatttttccattcagtccaatgggttagataattttcatatgcacggctagtgtcgattgaataagtggagaacgaatttgaaattaatctgtgattgttatttgtcgggagcataaatatcagggcgtattctttatgttgagaggtgttggattcttttttatctgctttgcaatgttattggttcccttcagcagtagacaggaacttctggaggaggcggatatatagtttgtgtaagcatattaactccatatgttatatattgaagaacttctgctttacactatcctaaactggatcggtttaatgtaaaaaaacgatactttttgggggagggggcaatttttccttaaggtatgaaaaaaggagctgaagctatataatagctattaatgccactggtatcagtgaatcatgtatataaaaaactgtgttaaggaggctgtccattagcggttttttattcttctggaaccgcggcatctttgcgtatctttttgtcttctcaccgtctggtcggtgttttgctgagactgctaatttcctgtctttgctagtgctgtactggtactgcccaatcatgattggcgggggcgggcggagttgagaccgcagacacgtcgtatgcaagaacgtgctgcggctggctggtgaacttccgatagtgcgagtattgaatgatttccagccgttactgattttacgtgctaattagtgaacaaaccactcgtcagcagactcccaggtatctttcagagtttcctgaacaaaagttttagctgaatctttatcggcggtgcgcgtaacagaaaggccatcgttgctggtggcttttacgatcacctctacatcgtcataacgtttactgatgcgtcgggttaattcttcctttaacgcatccacagcaccggttggcattttagtcattttctctttggctatgcagatttcaatacgcataaaaatccctctacactgtgtttttatacagtattatttttaactgtatggataaacagtgtcaagagtgagggaaagtgattttttggggcatgcatggggcaaaaatatttgttgtggggcattttggggcatgattgggacactttgttacatatgaactttgccgattttcatatggcatggcaatccaacgctttgattattctaaagaaaacacatgctcttgggcgttctttagtgatttttaaaaatcccgtatcacgcagttaaagtggcgggcatactcttcaaggctggtgatccccaaccgcacccatttaggatgcgaccattgcggtagaccgatgtaaatcataacgcgtgaaggatctcttccacgctacgcacacgggcgatgcgcgggtagatatgattaatgctgttattgtgttgctcggcgctggcggcactacaggcgtcttcggcaatcaccagattaaagccaagttcccaggcattgcgggcggtggattcaacaccgatattggtcgagatcccacataacactattgtatcgatacctcggcggcgcagttgcaactccagatccgtaccgtaaaacgcaccccactgacgtttgatgatttcgatatcactgtcagttgcacctaatgcagctggatgttgccaccagttttcgggcaacactttagcgggggagggggcatcaaccggctgttttaatgcttcggcgtaatcggcagaccagccaactcgcaccagaaacacgggctgaccgctggcgcgaaatttcgccgccagcttcccggcgcgattaactacctcatcggcagtatgtggaccaccggcaaaaggtaagatgccttcttgtaaatcgatcaccaccaacgcagtggttttagcattaagttcaagcatgctgactcctgaaaaaacaaaatcgtgcctcacaccttaatgcgattagccgatggcggaacgacaaattttgttaatttttatgagttcgggcaacacctttatagcaaactggcgtagagtctgatttcaggcccgatataaagtggtaacgaggcgttacagcgcgggccaggctcttacggtgcggcagaatttccagtataatagccgccttttttcattcagttgtgacatacagctaacgctgcgacttggtcacctgcgcagcagggggcatccgccggcagctaagttaagggatatctcatgcgtacagaatattgtggacagctccgtttgtcccacgtggggcagcaggtgactctgtgtggttgggtcaaccgtcgtcgtgatcttggtagcctgatcttcatcgatatgcgcgaccgcgaaggtatcgtgcaggtatttttcgatccggatcgtgcggacgcgttaaagctggcctctgaactgcgtaatgagttctgcattcaggttacgggcaccgtacgtgcgcgtgacgaaaaaaatattaaccgcgatatggcgaccggcgaaattgaagtgctggcgtcctcgctgactatcatcaaccgcgcagatgttctgccgcttgactctaaccacgtcaacaccgaagaagcgcgtctgaaataccgctacctcgacctgcgtcgcccggaaatggcgcagcgcctgaaaacccgcgctaaaatcaccagcctggtgcgccgttttatggatgaccacggcttcctcgacatcgaaactccgatgctgaccaaagccacgccggaaggcgcgcgtgactacttggtgccttctcgtgtgcacaaaggtaaattctacgcactgccgcaatccccacagttgttcaaacagctgctgatgatgtccggttttgaccgttactatcagatcgttaaatgcttccgtgacgaagacctgcgcgctgatcgtcagcctgaatttactcagatcgatgtggaaacttctttcatgaccgcgccgcaagtgcgtgaagtgatggaagcgctggtgcgtcatttgtggctggaagtgaagggcgtggatctgggcgatttcccggtaatgacctttgcggaagcagaacgccgttatggttctgataaaccggatctgcgtaacccgatggaactgaccgacgttgccgatctgctgaaatctgttgagtttgcagtatttgcggggccggcgaacgatccgaaaggccgtgttgccgctctacgtgttccgggtggcgcatcgctgacccgtaagcagatcgacgaatacggtaacttcgttaaaatctacggcgcgaaaggtctggcttacatcaaagttaacgaacgcgcgaaaggtctggaaggtatcaacagcccggtagcgaagttccttaatgcagaaatcatcgaagccatcctggatcgtactgccgcgcaagatggcgatatgattttcttcggtgccgacaacaagaaaattgttgccgacgcgatgggcgcactgcgcctgaaagtgggtaaagaccttggtctgaccgacgaaagcaaatgggcaccgctgtgggttatcgacttcccgatgtttgaagacgacggtgaaggcggcctgacggcaatgcaccatccgttcacctcaccgaaagacatgactgctgcagaactgaaagctgcaccggaaaatgcggtggcgaacgcttacgatatggtcatcaatggttacgaagtgggcggtggttcagtacgtatccataatggtgatatgcagcagacggtgtttggtattctgggtatcaacgaagaggaacagcgcgagaaattcggcttcctgctcgacgccctgaaatacggtactccgccgcacgcaggtctggcattcggtcttgaccgtctgaccatgctgctgactggcaccgacaatatccgtgacgttatcgccttcccgaaaaccacggcggcagcgtgtctgatgactgaagcaccgagctttgctaacccgactgtactggctgagctgagcattcaggttgtgaagaaggctgagaataactgatatgactcaaatacacgaaatcattcgcgttgcatcaaggcggcaactgagtgaactcccatgagcatagataactatgtgaatgggatgagcgaaggcagtcaacgaagaggcagcgtgaaggataaagtgtataagcgtcccgtttcgatcttagtggtcatctatgcacaagatacgaaacgggtgctgatgttgcagcggcgtgacgatcccgatttctggcagtcggtaaccggcagcgtggaagagggtgaaaccgcgccgcaagctgccatgcgcgaagtaaaggaagaggtcaccattgatgttgtcgctgaacaactgaccttaattgactgtcagcgcacggtagagtttgaaattttttcacatttacgtcatcgctatgcgccgggcgtgacgcgtaatacggaatcatggttctgtcttgcgctcccgcacgaacgccaggtagtcttcactgaacatctggcttacaagtggcttgatgcgcctgctgccgcggcgctcactaagtcctggagcaaccggcaggcgattgaacagtttgtaattaacgctgcctgaacaggcagggctatctggagatatttttatggcaggtcatagtaaatgggccaacaccagacatcgtaaagctgcgcaggatgctaagcgcggtaaaatcttcactaaaatcattcgtgagctggtaaccgcggctaagctgggcggtggcgatccggacgctaacccgcgtctgcgtgcggcggtggataaagcactgtctaacaacatgacccgtgacacactgaaccgcgcaattgcacgtggtgtgggcggtgatgatgatgcaaacatggaaaccatcatctacgaaggttacggtcctggcggcacggcaatcatgattgaatgtctgtctgacaaccgcaaccgtaccgttgctgaagtgcgtcatgcatttagcaaatgtggcggtaacctcggtactgatggttccgttgcctatctgttcagcaaaaaaggcgtgatctccttcgagaaaggcgatgaagacaccattatggaagcagcactggaagcaggtgctgaagacgttgtgacctatgatgacggcgcgattgacgtctacactgcatgggaagaaatgggtaaagtgcgcgacgctctggaagcggcaggtctgaaagcagacagcgcggaagtttccatgatcccgtccaccaaagctgatatggatgcagaaaccgcaccgaaactgatgcgtctgatcgatatgctggaagattgcgacgacgtgcaggaagtctaccataacggtgaaatctctgatgaggttgcagcaactctctgatggggcctgctaaacagcaaaacggagacgcgtgatggctattattctcggcattgacccgggttcgcgcgtgatcggctatggtgtcatccgccaggtaggcaggcaactgtcctacctgggtagcggatgcatacgcaccaaagtggatgatttaccgtctcgtctgaagctcatctatgcgggcgtgacggaaatcatcacccagttccagccagattatttcgccattgaacaagtctttatggccaaaaatgccgactcggctctgaaactggggcaggcgcgcggcgtggcgattgtggcggcggtgaatcaggaattgccggtatttgaatacgcggcacgtcaggtaaagcaaacggtggtaggtattggtagtgccgaaaaaagccaggtgcagcatatggtccgcaccttgctgaaactgcccgctaatccacaggcggatgccgccgatgcgttagctatcgcgattacccattgtcacgtcagccagaatgcaatgcagatgagcgaatcgcggctgaacctggcgagagggcgactgcgttaagttataccgcctcggtcagttcaggctgaggcgtttcaactccctccgcgtgaatcaacaccagacccggatgatgccacaaactggctggcgtgacggttttacgctcccacggaatagaacctaagaaccagaatttccagaaagtgagttttgcattcggattgctatttaacagttctccaaacgtttctatttcacccaccggaatgcatagcgcttctttataaatatcaaaaacaaattttgaacagaactggcgcgaagattcgtatttaaaaccggtgtggtaaagtttgcgtagccgggagggaacctgttcaacaattcgttgtttttgttgttctgtcagcccagcgtctaatcgctttatagcatagcgttgattagacgaacgtttaataaaacgagatagcgtggtgatggttgaaaggggaacccggctttctgcaaccaggaagtcttcaccgttatgaccgataatgatcccgacgtgattactccagcaatttgatgcagctgatatttgaccaaataaggcagcacctatacatgtaaagacgatatctccaatttcatattcagcagggtaattaatattcacgttgtcattccattgaaatagatacgaatatacgtaatagcataaaaaatttatttttttttcaggaggcgcaatgtatatttttattacgcatttattcactgaatatgtaatattaaaatatttgcttccaatataacctgtagaataaattatactgtgccatttttcagttcatcgagacacctcgcaagttttcttcatccttcgctggatatctatccagcatttttttatcatacagcattatctttgattcattacgcaggagcgtcatgtgataggcagactcagaggcatcatcattgaaaaacaacccccgctggtgttaattgaagtgggcggcgtaggctatgaagtgcatatgccgatgacctgtttttatgaactccctgaagcgggtcaggaagcgatcgttttcacccactttgtggtgcgtgaagacgcgcaactgctgtacggttttaacaataaacaagagcgcacgttgtttaaagagttaatcaaaaccaacggcgtcggcccgaagttggcgctggcgatcctctccggaatgtcagcgcagcagttcgttaatgccgttgaacgtgaagaagtgggagcactggtgaaactgccgggcattggtaaaaaaaccgccgagcgtttaattgtcgaaatgaaagaccgatttaaaggtttgcacggcgatctctttacgccagccgccgatctggtgctcacgtcgcctgccagcccggcaaccgacgatgctgaacaggaagcggttgccgcgctggtggcgctgggctataaaccacaagaagcaagccgcatggtgagcaaaatcgctcgcactgacgccagcagtgaaacattaattcgcgaagccctacgcgccgcgttatgaggtaaaggatgattgaagcagaccgtctgatttctgccggtaccactttgccggaagatggggcagatcgcgccattcgccctaaattactggaagagtatgttggtcagccgcaggttcgttcacagatggagattttcatcaaagcagcgaaactgcgcggcgatgccctcgatcatctgttgatttttggtcctccggggttgggtaaaactacgcttgccaacattgtcgccaatgaaatgggcgttaatttacgcacgacttctggtccggtgctggaaaaggcgggcgatctggcagcgatgctcactaaccttgaaccgcatgacgtgctgtttattgatgagatccaccgtctatcgccagttgttgaagaagtgctgtacccggcaatggaagactaccaactggatatcatgattggtgaaggtccggcggcacgctccattaaaattgatttgccgccgtttaccctgattggtgcaaccacgcgcgcaggttcgctgacatcaccgttgcgcgaccgttttggtattgtgcaacgtctggagttttatcaggtgccggatctgcaatatatcgtcagtcgcagcgcacgctttatggggcttgagatgagtgatgacggcgcgctggaagttgctcgtcgcgctcgcggtacgccacgtattgccaaccgtctgctgcgtcgagtgcgtgatttcgccgaagtgaagcacgatggcaccatctcggcagatatcgctgctcaggcgctggatatgttgaatgtcgatgctgaaggtttcgattatatggaccgcaaattgttgctggcggtaatcgataagttctttggtgggccggtaggtctggataacctggcggcagccattggcgaagaacgtgaaaccattgaggatgtgctggagccttatctgattcagcaaggctttttgcagcgtacaccgcgtgggcgtatggcgacgacgcgggcgtggaatcactttggcataacgccgccagaaatgccgtaagtcggattggtcgctcgcaccgcatccgacattggcagtgtgcctgatgcgacgctattcgcgtcttatccggcctaccagagatagcgaaccgtaggtcggataaggcgctcgcgccgcatccgacaaatgtgttcagcgacagattagctggcctgctttttcatcatactgataataaataacagtgcagcacatagcactaccgacggacccgccggcgtatcgtaaaacgcggaaaaggttaaaccgccagttactgccaccatccccaccaaaacagcgacaccagccatctgttccggcgtacgggcaaagcgacgcgcagtagctgcaggaataatcagcaacgaagtaataatcaacgcaccgacaaatttcatcgctacaccaatcgtcaatgccgtcaccagcatcaacaacaatttcacgcgctgtaatttcacaccatcaacaaacgccagatccgggctaatcgtcatcgacagcaaattgcgccattgccagaacaaaatagccaccacgatgaccacgccaatcgcaatagagatgagatcttctggcgtcactgccagcaaatcaccgaacaggtaagccatcaaatcaacacgaatattagacatcagactaacgaccaccaggcccagcgacagggcactgtgcgccataatccctaataacgtgtcgatcgccagctgtggacgcttctccagccataccagaccgcccgccagcagcagcgtaacggcaatcaccgcatagaatggattcacgtccagcaacaaaccaaacgcgacaccaagtaatgaggcatgagccagcgtatcaccgaaataagacatacgacgccagactacaaacgaacccagcggacccgcggcacaggcgagcatgatcccggctaaccaaccgggaaataataattcaatcatgagcgatcatttccccgacgcaaaacaattcgtccctgtaaatcgtgacgatggttatgatgatggcgatagatacccagttgttcagcaccacgaggaccaaacattgaaataaactccggatgcagggaaacaacttccggtgtgccggaacaacaaatgtggtgattcaggcacagcacttcatcggtttttgccatcaccagatgcagatcgtgagaaaccattaaaacgccacaatccagttcacgacgcagttggtcaataaggtcatataacgccacctggccatttacatccacgccttgagtgggttcatccagcactaataattgcgggcgatttaacaatgctcgcgctaacagtacacgctgcgtttcgccaccagagagcttttgcatcggtgcgttaatcaggtgcccggcctggacacgtttcagtgcaggcaaaatatcttctttatgtgtaccagggcgtaagcgtaaaaaacggtttacggtcagtggcaacgtggtgtcgagatacagcttctgcggtacatagccgatgcgcagttttccgttgcgcttgataaccccttcatcgggtgttaccagcccgagcactacccgtaccagtgtcgacttacctgcgccatttggcccaagtaaagtcaaaatttttccaggtttaagttccagcgacacatcagagaggacgcggcgttggccaaaagaaaccgagacattttccaaggaaaccagacttgtcatgttaattttagtcttgcagtagtcatgaaatgttataatatcacacttctcatattcattacgatgattggtcgcattatgttacataaaaaaacgcttcttttcgcagcattatccgccgctctctggggaggtgcaacacaggccgcagatgccgccgttgtcgcttcgcttaaacccgttgggttcatcgcttctgccattgctgatggggtaacagaaacagaggttttacttcctgacggcgcttcagaacatgattattcactgcgcccatcggatgtaaaacgcttacagaacgcggacttagtcgtttgggttggcccggagatggaagcgtttatgcaaaaaccggtaagcaaattaccaggagcgaagcaggtaacgattgcgcagcttgaagatgtgaaaccgctactgatgaaaagtattcacggcgatgatgatgatcacgaccacgcggaaaaaagtgacgaagatcaccatcacggcgatttcaacatgcatctttggctttccccagagatagcgcgggctacagcggttgcaatccatggaaaattagtggaacttatgccgcaaagtcgagccaaacttgacgccaacctgaaggattttgaggcacaattagcctcaaccgaaacgcaggttggtaacgagctcgcgccgctcaaggggaaaggttatttcgtttttcacgatgcttacggctatttcgaaaaacagttcggactgacaccgcttggtcattttaccgttaaccctgagattcaacctggcgcgcagcgtttacatgaaataagaacacagttggttgagcaaaaagcaacctgcgtttttgctgagccacagttcaggccagcggtcgttgagagcgtcgcacgagggacatccgttcgtatgggaacgttggatcccctggggacgaatatcaaactgggtaaaacaagctattcagaattcctgagtcaattagccaaccagtatgcgagctgcctgaaaggagattaatgaggaagtgattacgtgcaacagatagcccgctctgtcgccctggcgtttaataatttaccgcgaccacaccgcgttatgttggggtcgctcaccgttcttactctggccgtcgctgtctggcggccctatgtttatcaccgcgatgccacgccaattgtcaaaaccattgagctggaacagaacgaaattcgttcgctcttacctgaagccagtgagccgattgatcaagctgcacaagaagatgaagccattccccaggacgaactggatgacaaaatcgccggtgaagcgggcgtgcatgaatatgttgtttccactggcgatacgctaagcagcattctcaatcagtatggtattgatatgggtgatatcacccaactggctgcggccgacaaagaattgcgtaacctgaaaatcggtcaacaactctcctggacattaaccgcggacggcgaactgcagcgcctcacctgggaagtgtctcgtcgtgaaacccgaacctatgaccgtactgccgctaacggttttaaaatgaccagcgaaatgcagcaaggagagtgggttaacaatctgctgaaaggtaccgtcggggggagctttgttgccagcgccagaaacgccggtttaaccagcgccgaagtgagcgcagtgattaaagccatgcagtggcaaatggatttccgcaaactgaaaaaaggcgatgaatttgcggtgttaatgtctcgagaaatgcttgatggtaaacgtgagcaaagccagctgctgggcgtacgtttgcgttcagaaggtaaagattattacgctatccgcgctgaagatggcaaattctacgatcgtaacggtactggtctggcgaaaggattcttgcgattcccgacggcgaaacagttccgtatctcgtctaactttaacccgcgtcgtactaatccggtgaccggtcgcgttgcagcacacagaggtgttgatttcgccatgccgcagggtacgccagtgctttcagtgggtgacggtgaagtggtggttgccaaacgcagtggcgcagcaggttattatgtggctattcgtcatggtcgcagctacaccacgcgttatatgcacttgcgcaagattctggtgaaaccgggacagaaggtgaaacgtggcgaccgtatcgcgctttccggtaataccggacgttcaaccgggccgcatctgcactatgaagtatggataaaccagcaggccgtaaacccgctgacggcaaaactgccgcgtaccgaagggctgaccggctccgatcgtcgcgaattcctggcgcaggccaaagagattgtgccgcagctacggtttgattaattaacatccattcgcagccggtacgcagtcagtatcggctttttttatttggtgcggggcaagttgcgccgctacactatcaccagattgatttttgccttatccgaaactggaaaagcatggaaacgaaaaaaaataatagcgaatacattcctgagtttgataaatcctttcgccacccgcgctactggggagcatggctgggtgtagcagcgatggcgggtatcgctttaacgccgccaaagttccgtgatcccattctggcacggctgggacgttttgccggacgactgggaaaaagctcacgccgtcgtgcgttaatcaatctgtcgctctgctttccagaacgtagtgaagctgaacgcgaagcgattgttgatgagatgtttgccaccgcgccgcaagcgatggcaatgatggctgagttggcaatacgcggaccggagaaaattcagccgcgcgttgactggcaagggctggagatcatcgaagagatgaggcgtaataacgagaaagttatctttctggtgccgcacggttgggccgtcgatattcctgccatgctgatggcctcgcaagggcagaaaatggcagcgatgttccataatcagggcaacccggtttttgattatgtctggaacacggtgcgtcgtcgctttggcggtcgtctgcatgcgagaaatgacggtattaaaccattcatccagtcggtacgtcaggggtactggggatattatttacccgatcaggatcatggcccagagcacagcgaatttgtggatttctttgccacctataaagcgacgttgcccgcgattggtcgtttgatgaaagtgtgccgtgcgcgcgttgttccgctgtttccgatttatgatggcaagacgcaccgtctgacgattcaggtgcgcccaccgatggatgatctgttagaggcggatgatcatacgattgcgcggcggatgaatgaagaagtcgagatttttgttggtccgcgaccagaacaatacacctggatattaaaattgctgaaaactcgcaaaccgggcgaaatccaaccgtataagcgtaaagatctttatcctatcaaataaaaaaagcctctcaaattattgagaggctgtactcgataaaaaatctcaatgagtgttcccactattttgagtttttaggttagtacgctattgagttaatcgtagcgtgataatttcaaaaggtttgaactcaagattgcaatattgattgcaataaaaactgtcatctaacttattttcttgaagatcgacatattgaacgtagtgataattacatactcacgaaagcatggctgaaatttctaatccatgactctcatataatcttacgattataccgtcgccgtcttcagctaattttattgtttcgatgataacgctgttagtatcgatagcaaaaaatgatagtgaagggggtaattcacccgggtgcggtttgacagggacgacctgtaagggatgattcattatataggcttgattaataacaccacccacacggtaatctccatgatgaggaaataaggagaatatgaatttttgtttaccaatatctgcaaaattattaatcaggaaattatcataattgtctgtcttaacaacttccccaggtttatgctgcgaacgcagcaaagttaattcaagcgtctggtctttgacacgatagccatatttgttttttgctattaaagctatgccagtttctcgatcagaaaggtcgacccagtgatgtgctggtatttcatctttggcaaaagcgaacgaatcatcgctatgcgttggtctgtcaattacaccgaactgaatttgacattgtgcaagagatgtttgtactgacaccgggaattttactttgagagaaacattaggttcgtgccaatcaataaacgtttggacatcaacgcgtggactatcctgtgtcagggtaaaggctaaacgaagataagaggaattgtagtgataaatcagcgtcatcgtagttttaggcccgctgatcacagttgtcattttttcagcgagtaaaacatatgattccccatcacgataatttgaagcaaaatcccaggccgcgaaaaaacctgcatcttcgtggtatgcacggatctcactgtgcatattttcagtaatgtattctttaccatatcttttatcatatagcgaaattaaatcaccgctttctgaaaaaagaagtttaatgtaattattttcaatactttgagattctgccttcagaccatttacgatcttattctttggaacaatcacagcataaccataagagtttactcgtgctttgagccagttgttgtttatattgatccattcgttacgagcaaaacaggtggtattaaacaaaatgtgcggatctttataagaagaagtgtcaattttacttaataaagtagactgcgcatcagaaataattttctcggtttttgcttctagtttaagatattccttttcagtttcatgataaactcttgaaatacatgagccgggaaggatgtcatggaattgcaaggtcagcatcgctttccatatttcatcaaactcactgcgaagaattgatgtcatattattagtaatagttataaaaaattcagcggtaatgactccaacttattgatagtgttttatgttcagataatgcccgatgactttgtcatgcagctccaccgattttgagaacgacagcgacttccgtcccagccgtgccaggtgctgcctcagattcaggttatgccgctcaattcgctgcgtatatcgcttgctgattacgtgcagctttcccttcaggcgggattcatacagcggccagccatccgtcatccatatcaccacgtcaaagggtgacagcaggctcataagacgccccagcgtcgccatagtgcgttcaccgaatacgtgcgcaacaaccgtcttccggagactgtcatacgcgtaaaacagcgagcgctggcgcgatttagccccgacatagccccactgttcgtccatttccgcgcagacgatgacgtcactgcccggctgtatgcgcgaggttaccgactgcggcctgagttttttaagtgacgtaaaatcgtgttgaggccaacgcccataatgcgtgcagttgcccggcatccaacgccattcatggccatatcaatgattttctggtgcgtaccgggttgagaagcggtgtaagtgaactgcagttgccatgttttacggcagtgagagcagagatagcgctgatgtccggcagtgcttttgccgttacgcaccaccccgtcagtagctgaacaggagggacagctgatagaaacagaagccactggagcacctcaaaaacaccatcatacactaaatcagtaagttggcagcatcaccaaattcagcatcatgtaatttattttccatatttcgattatgagctttagttgctgactctgatgtaaagcacccttgatgagcctcgaaataaagttcacctgaaataatgggcaagctttcgcgaaaggcgtcggcgtaagtgaagaacttatcaacacggctgaaatcaacatgaggtaagccatcaatattgcgtatacgtgttaatcgttctatatgttcctcaccggggccagcgccgccatcaccgacaccatacaccatacaccataagcgcatagggacagatctctttttcattatagttttgttcaatatattctaaagagcgagcacgtgctcggctatcataagtgtcttcaggaaagttatgcatcagaatttctgagccatccaggccctgccagcggaaaaggtaattattaaatttattaatcttgttttgtgagagcttttgcgatgcaatatagttaatgcctgattttttgagaatttgtggaagcgttgcggggaatccaaagacatccggttgccagacataatttatcttttttgaaaaattctgcagtgtgaatcgtgtcccatgcatgatttgccttatcagcgattcaccacttaccagatttaaatcgcattcgacccagaagcaaccttgtaactcaaagcggcctgcggcgatttgtttttttaacttttcgaagaaatagggataatctttttttatccagtgaaaaagttggtactgactagcgccaaaaatgtaatcaggatatttttcaatgtttgcaagggcggtggcaaatgttcttattgcttttctgcgtccttctcttaaaggccacatccacgctatatctaaatgggcatgaccagtagccataatcctgaactctgaaggattattgtttttattgattatggattggattgcaatttgacatttaattatttcttcattgctaaaggtaattaacgtattatcaatatattcgagagtacttatgatttcgtcagtacgctcacttcttttggcaataaattgttctggggtgatacctttaggatgtatggattcaaacttctgaccatcattaatccagtcgaaaagcacctcaatatcataataaagggatttcagtagttgattacgtgtcgcgatatgaacatcagtaataatccctccattagtaacatagccaaataaatcgttgcaggcagcatcaatccaaaactcaacctcgtcattttcactaacgagagaaaggtcaaccacccatttacctggtttatctggcggtacgccataagatgatgctttattcgtgatgccgcagatgggtgaaccattcttatccacaataagaccttcgccaccgatatcaacgagagcgacgagtttgtgtctaaatttatctgctggacgtttaccataaactcgcatccaggcacagtcaaacagttgaccccagtctgagccaatggtgagtttctggtaagcgccgctacggcgataaacaaaaggctgcggttcttttgttatccatgcttcaatcgacatttcagagacaacagtataaacacgctgacctattttattcgacagtttgataatattatcagtaaggtacatagaaatccctttaattaattataacactcgaaaatattaactctctatattggagaaagttactttgcgaagaatggtttgaccaaatggtataagttttctgactattttagtcttgtttaaataaaaacagccttcaatgtattgtttgccctctggtgaggttgaatatgaaaaagattccatatcagcataagagaactggatagattcatcagctctactacagggtatgtatcctgagtcaaaatatttcccgttcagcaggttttttttgattaaaatatcgctctcaagctcaattgcatataaaacgggacctctggaaatataagtgtcaccacataagtcagtattaaactgtatatcagctataaatttaatgtcaatcacatcatgatgttgccatgttctatctaaaataataagtgagttttgagtatcatttttagtaaaagtaacaccattaataatcatcatttttgcccagccggggtaacggaaactgagagcaaaacgaacagatgactcaggctcaatgagacattttacgcttaaatcatgagggtattcagttaattgtgtaattttaattgcaacattattaaatgtgccataaaactcacacgggccataaaataatgcagtaaaaccattgttattttcttgaaacatattttcgacaaaagccggtatggttcttgctgtattcggtacgcagcagacagcagcctcctcatgagtaggggagtatttatatctggtattaaactgattactgtcaggatgtttcctttcatttgcttcataacaattatcagtcttacagtacattatcgcgtgaagtatgggatgctgcatgccaaaactagcattatagaatagccactcagcatcatcggccagaccaatattagtggtcagttttattaacataacataagtgctaaatagttcatgaacagaacaatattcatagcctgtataagtggcattagctgtgcgtcctgtaatccactcatcaccaatgggagcgccagatggtgtaagataatatttcaactgggataaaaaaatatctaatgcagtttgatactgcggccgttggctcgctgcgatggctaatgccctaatatgctcatacgtatgtacgccatgacctttaagaaggtaaccagggtctatgacatttttatattgcagatcttgctccgacacgcatcctgcggaataatcttcatacagccacaagcaatatgagagatattcaatgttattggttatttcataaaggcggtagaaaacatctgttattgttaatccgtggctatgtccagcaaaaccctgttccacaacgaaaggatgtgacgtttctttagggtagccagccataatgcattgtgcggcttgggtaagagaagttaataaactctcattacgggtggactcataacatccaagcacaaaacgcaaggcagtagcttgtgcccagaactctccgttttctgctttacagttaaattttaatgatgaatcataaattccaatgtagccatcatcatcttgcgtatcgataagttccaaacataaatcgctcgctttttcctgccattctttattatctaacaagtaggcactgcggcaatatccatccttccaattcgattgagtttcactatcccaccaataatattgcatcatgttatcatcgggattattctgttttttaataacgccatcttcagcagatacagtgcgtggagttatacgatctcttccatatattttatgctccgtaataagatggggaactaatttatccagttctcctatatgaccgttcatataccattccatcttattctttaaccaaccagtgggctttatatcgttaaaaaaaatcataaatacacctttgcataaaaaagtttagacgttataaaagacaaatagattgtgatcgcctacagacgatcacaatgaaaggaaaatattaacggtttttgctatcactcaaatgtttttcatcctgcaccatatcattgccagattcatgcaaagtatttattaatgcattggcatctggatattgttgctgatacttggttagatatatatcactatggatatgttcggcaattatattgataagcaagcgattattcgagtataaccccagtgattcagctcgttgtgaaaaaaccattactgtcttcatatcaacaacaagcataaaacggtgagaagggtaatattcttcttcatggttaaagcggtaatacagttctacacgtgggtcggtgatgctgccaacttactgatttagtgtatgatggtgtttttgaggtgctccagtggcttctgtttctatcagctgtccctcctgttcagctactgacggggtggtgcgtaacggcaaaagcactgccggacatcagcgctatctctgctctcactgccgtaaaacatggcaactgcagttcacttacaccgcttctcaacccggtacgcaccagaaaatcattgatatggccatgaatggcgttggatgccgggcaactgcacgcattatgggcgttggcctcaacacgattttacgtcacttaaaaaactcaggccgcagtcggtaacctcgcgcatacagccgggcagtgacgtcatcgtctgcgcggaaatggacgaacagtggggctatgtcggggctaaatcgcgccagcgctggctgttttacgcgtatgacagtctccggaagacggttgttgcgcacgtattcggtgaacgcactatggcgacgctggggcgtcttatgagcctgctgtcaccctttgacgtggtgatatggatgacggatggctggccgctgtatgaatcccgcctgaagggaaagctgcacgtaatcagcaagcgatatacgcagcgaattgagcggcataacctgaatctgaggcagcacctggcacggctgggacggaagtcgctgtcgttctcaaaatcggtggagctgcatgacaaagtcatcgggcattatctgaacataaaacactatcaataagttggagtcattaccatcatttatggggaggtgatacccactctgagtctgcatgggcaaaacgtttcccagaaatgttgaaattattttattgctgatgaaacctgtgaaggatgttgaatgcatcatattaaaacagccgcggatcttaattgttttttaaattcaatggttgctgtttcgcaaccaactgttgataaaattatttttggtgctgaggcgacacttattaataaaattgggacctgctggattgcctcaatggatgttttaagaaaggctgtttttgaaggtgtcaatatcattattacacatgagcctacattttattcttatgctgatctggagggtgacgatcttgagttttcatgggccagaaaaataatggattatactcgcggtgaactcagttatttaaaaataattgagcaaaaaaaggagtttttgcataaaaataatttggtaatcattcgttgccatgatgtcatggatcgagagcctacgttcggaatgtctaaggctttggctcagcagttagaactggatgttacaaatattgttgcttctgatgagatgtactgtgtatatgctatagaccctgacagtgccattaacattaccaaacgttttgccaaaaatttgaaaatatataatcttcctggcattcaattttatggagataaagccagagtagtcagaactgttggcattggggcaggctgtttttgtgatccaatacaatatatggaatatcaggctgattattatattacgattaacgattcaattaaaacatgggtgcagacacaatactccaaagatagtggcttaccgatggcagttattggacatagtgttgcagaggaagcgggtatgcgacgtcttgcaagctatttagatctccattcaggctatccctgtattcattttacagggggctgtgattatgattggattgaataagtagtcctaatttatgtgttgctaaataccccggccatcagcggccggggcaggtgagattactctaccgttaaaatacgcgtggtattagtagaacccacggtactcatcacgtcgccctgggtgacaatcaccaggtcaccagacatcaagtaacctttatcgcgcagcagattaaccgcttcgctggcagctgctacgccgtcattagcgctatcaaagtgcaccggcgtaacgccacgatagagagcagtcaggttcagcgtacgttcatggcgcgacatggcgaaaattggtagaccagagctgatacgggaggtcatcagcgcggtacgacccgattcggtcatggtaataatcgccgtaacgcctttcaggtggttagctgcgtacattgctgacatggcaatagcttcttccacattgtcgaactgaacgtccagacggtgtttagaaacgttgatgctcgggattttttccgcacccaggcaaacgcgcgccatggctgcaacagtttctgacggatactgccctgcggcagtttctgcagacagcatcacagcgtcagtaccatccagaacggcgtttgctacgtccatgacttctgcacgcgtcggcatcgggttagtaatcattgactccatcatctgggtcgccgtgattaccgctcggtttagctgacgcgcacgacggatcaacgctttctgaatgccgaccagttccgggtcgccaatttccacaccgaggtcgccacgtgcaaccattaccacgtcagaggcgaggatgatgtcatccattgcatcctggctgcaaacggcttccgcacgttcaaccttggcaacaattttcgcatcacatcctgcatcgcgtgccaggcgacgggcatagttcagatcttcgccacagcgtgggaaggagacagccaggtaatctacgccaatcaacgccgcagtcttaatgtctgctttgtctttttcggtcagcgcttcagccgacaaaccgccgccaagtttgttgatacctttattgttggagaggggaccaccgacggtgacttcggtgaacactttcatgccctgaacttccagtacttttaactggacgcgaccatcgtccagcagcaggatgtcaccaggcacgacgtcagcaggcaggcctttgtagtcgataccgactttttctttgtcgccttcacctttacccaggttggcgtcgagcaggaatttatccccaatattgaggaaaactttgccttctttaaaggtggatacacggattttgggcccctggaggtcacccagaatagccacatgacgccccagttttgcggcaatctcacgaactttatccgcgcgcattttgtgatcttcaggcgagccgtgagaaaagttcatacgtacaacgttggcacccgccgcgataactttttcaagattattatcgcgatctgttgctgggcctaacgtggtaacgatttttgttctgcgaagccttctggacatgtaatactccgttgactgaaacaaccaggtgttgcttgaacatgaaatccgaatgaaataacgccgcgatggcgataaattaatctcattcggatgtcgtataagattaggacagtgacagtcgtttttagcgatcgtcacttaaattaagtaactgcttatcaaaacgcgattccttcagcgcttccttgacccgcttcaagttatctctgaattttgcaccgcgtcgcaaagtaaatcctgtcgccagcacatctatcacggtcagctgtgcaagtcgagaaaccatgggcatataaatgtcagtatcttccggtacgtcgagggtaattgccagcgttgcttcccgggcgagcggggtacccgcagaggtgagggcaatcaccattgcgtcgttttcgcgagccagctgcgccagctcgaccagattttttgttcttccagtgtgagaaatcagcaccaccacgtctccgtcgctacaattcatacaactcatgcgttgcagcacgatatcatcggagtacaccaccggaacattaaaacgaaagaacttattcatcgcatcgtgggcaacggcggctgaagagcctaatccgaaaaaggcgattttttttgcctgagtgagcaagtcgacggcgcggttgatggcagatttatccagtgaatgacggacatgatcaagcgttgccattgcggactcaaatattttccctgtgtatgattcaacgctgtcatcttcattgacattgcgattaacatagggagtgccattcgccagactctgtgccagatgaagtttaaaatcaggaaaaccgcgcgtgtccatgctgcgacagaaacgattcaccgtcggttcgctaacattggcttccagtgccatagcagcaatactcgaatggatcgcgttatcgggcgaagccagaatgacctcggcaactttgcgctctgatttgctcaaatgttccagctgagactggattttttccagcatattcatgatgtaaagagactcacgggtaatgacgatttccgcactgaaagaaatcgaaatgcagttttgtcagatattacgcctgtgtgccgtgttaatgacaaaagcagataaaaaagttgttattttttttcataacatgatcagtgtcagatttttaccgaatggaaaacgatgatttttttatcagttttgccgcactttgcgcgcttttcccgtaatcgcacgggtggataagcgtttacagttttcgcaagctcgtaaaagcagtacagtgcaccgtaagaaaattacaagtataccctggcttaagtaccgggttagttaacttaaggagaatgacatggcggtaacgcaaacaacccaggcctgtgacctggtcattttcggcgcgaaaggcgaccttgcgcgtcgtaaattgctgccttccctgtatcaactggaaaaagccggtcagctcaacccggacacccggattatcggcgtagggcgtgctgactgggataaagcggcatataccaaagttgtccgcgaggcgctcgaaactttcatgaaagaaaccattgatgaaggtttatgggacaccctgagtgcacgtctggatttttgtaatctcgatgtcaatgacactgctgcattcaaccgtctcggcgcgatgctggatcaaaaaaatcgtatcaccattaactactttgccatgccgcccagcacttttggcgcaatttgcaaagggcttggcgaggcaaaactgaatgctaaaccggcacgcgtagtcatggagaaaccgctggggacgtcgctggcgacctcgcaggaaatcaatgatcaggttggcgaatacttcgaggagtgccaggtttaccgtatcgaccactatcttggtaaagaaacggtgctgaacctgttggcgctgcgttttgctaactccctgtttgtgaataactgggacaatcgcaccattgatcatgttgagattaccgtggcagaagaagtggggatcgaagggcgctggggctattttgataaagccggtcagatgcgtgacatgattcagaaccacctgctacaaattctctgcatgattgcgatgtctccgccatctgacctgagcgcagacagcatccgcgatgaaaaagtgaaagtactgaagtccctgcgccgcatcgaccgctccaacgtacgcgaaaaaaccgtacgcgggcaatatactgcgggcttcgcccagggcaaaaaagtgccgggatatctggaagaagagggcgcgaacaagagcagcaatacagaaaccttcgtggcgatccgcgtcgacattgataactggcgctgggccggtgtgccattctacctgcgtactggtaaacgtctgccgaccaaatgttctgaagtcgtggtctatttcaaaacacctgaactgaatctgtttaaagagtcgtggcaggatctgccgcagaataaactgactatccgtctgcaacctgatgaaggcgtggatatccaggtactgaataaagttcctggccttgaccacaaacataacctgcaaatcaccaagctggatctgagctattcagaaacctttaatcagacgcatctggcggatgcctatgaacgtctgctgctggaaaccatgcgtggtattcaggcactgtttgtacgtcgtgatgaagtggaagaagcctggaaatgggtagactccattactgaggcgtgggcgatggacaatgatgcgccgaaaccgtatcaggccggaacctggggacccgttgcctcggtggcgatgattacccgtgatggtcgttcctggaatgagtttgagtaatatctgcgcttatcctttatggttattttaccggtaacatgatcttgcacagattgtagaacaatttttacactttcaggcctcgtgcggattcacccacgaggctttttttattacactgactgaaacgtttttgccctatgagctccggttacaggcgtttcactcataaatcctctgaatgaaacgcgttgtgaatcatcctgctctgacaactcaatttcaggagcctttatgaatccacaattgttatgcgtaacaaatcgaatcattgaacgttcgcgcgagactcgctctgcttatctcgcccggatagaacaagcgaaaacgtcgaccgttcatcgttcgcagttggcatgcggtaacctggcacacggtttcgctgcctgccagccagaagacaaagcctctttgaaaagcatgttgcgtaacaatatcgccatcatcacctcctataacgacatgctctccgcgcaccagccttatgaacactatccagaaatcattcgtaaagccctgcatgaagcgaatgcggttggtcaggttgcgggcggtgttccggcgatgtgtgatggtgtcacccaggggcaggatggaatggaattgtcgctgctaagccgcgaagtgatagcgatgtctgcggcggtggggctgtcccataacatgtttgatggtgctctgttcctcggtgtgtgcgacaagattgtcccgggtctgacgatggcagccctgtcgcttggtcatttgcctgcggtgtttgtgccgtctggaccgatggcaagcggtttgccaaataaagaaaaagtgcgtattcgccagctttatgccgaaggtaaagtggaccgcatggccttactggagtcagaagccgcgtcttaccatgcgccgggaacatgtactttctacggtactgccaacaccaaccagatggtggtggaatttatggggatgcagttgccaggctcttcttttgttcatccggattctccgctgcgcgatgctttgaccgctgccgctgcgcgtcaggttacacgcatgaccggtaatggtaatgaatggatgccgatcggtaagatgatcgatgagaaagtggtggtgaacggtatcgttgcactgctggcgaccggtggttccactaaccacaccatgcacctggtggcgatggcgcgcgcggccggtattcagattaactgggatgacttctctgacctttctgatgttgtaccgctgatggcacgtctctacccgaacggtccggccgatattaaccacttccaggcggcaggtggcgtaccggttctggtgcgtgaactgctcaaagcaggcctgctgcatgaagatgtcaatacggtggcaggctttggtctgtctcgttatacccttgaaccatggctgaataatggtgaacaggactggcgggaaggggcggaaaaatcactcgacagcaatgtgatcgcttccttcgaacaacctttctctcatcatggtgggacaaaagtgttaagcggtaacctgggccgtgcggttatgaaaacctctgccgtgccggttgagaaccaggtgattgaagcgccagcggttgtttttgaaagccagcatgacgttatgccggcctttgaagcgggtttgctggaccgcgattgtgtcgttgttgtccgtcatcaggggccaaaagcgaacggaatgccagaattacataaactcatgccgccacttggtgtattattggaccggtgtttcaaaattgcgttagttaccgatggacgactctccggcgcttcaggtaaagtgccgtcagctatccacgtaacaccagaagcctacgatggcgggctgctggcaaaagtgcgcgacggggacatcattcgtgtgaatggacagacaggcgaactgacgctgctggtagacgaagcggaactggctgctcgcgaaccgcacattcctgacctgagcgcgtcacgcgtggggacaggacgtgaattattcagcgccttgcgtgaaaaactgtccggtgccgaacagggcgcaacctgtatcactttttaagacgacaaatttgtaatcaggcgagagaaaactctgatgaaaaactggaaaacaagtgcagaatcaatcctgaccaccggcccggttgtaccggttatcgtggtaaaaaaactggaacacgcagtgccgatggcaaaagcgttggttgctggtggggtgcgcgttctggaagtgactctgcgtaccgagtgtgcagttgacgctatccgtgctatcgccaaagaagtgcctgaagcgattgtgggtgccggtacggtgctgaatccacagcagctggcagaagtcactgaagcgggtgcacagttcgcaattagcccgggtctgaccgagccgctgctgaaagctgctaccgaagggactattcctctaattccggggatcagcactgtttccgaactgatgctgggtatggactacggtttgaaagagttcaaattcttcccggctgaagctaacggcggcgtgaaagccctgcaggcgatcgcgggtccgttctcccaggtccgtttctgcccgacgggtggtatttctccggctaactaccgtgactacctggcgctgaaaagcgtgctgtgcatcggtggttcctggctggttccggcagatgcgctggaagcgggcgattacgaccgcattactaagctggcgcgtgaagctgtagaaggcgctaagctgtaaaagtcaaaacgcccgatctacgatcgggcatttttgtagcgtttttttgccgggtttaaccctgtacttttacctgtccggcggcgtgcttcgcgcgttcaatggcgtcaacaacactctcagcggtcgccagcgcaacacccagacgacggctgccatcaatttccggcttaccaaataaacgaatctgcaaatctgcgcctacggcattctgcacattatcaaacgtgacattctgactggtcagttgtggcagaataacggcagaagctgcaggaccatactgacggatcccgccaaccggaagtccgaggaaggcacgtacatgcagggcaaactctgaaagatcttgagaaattaacgtcaccatcccggtatcatgtggacgaggggagacctcactgaaaatcacctcatcaccacagacaaacagctcgacaccaaacagaccataaccgcccagtgccagcaccactttacgggcaatctcctgcgcacgttcaagggcaagcgggctcatttgctgtggttgccaggattcacggtagtcgccatcttcctggcgatgacctaccggtgcacagaaatggacgccatccaccgcgctgacggttagcaaggtaatttcgaagtcaaacttaacgacgccttcaacaattacgcggcccgctccggcgcgaccgccttgctgagcgtacttccatgcctgagcaagttgctctgcagaacgaataaacgtctgccccttgccggaagagctcatcaccggttttacaatgcagggatagccaatgtcagcaaccgcctcgcggaaaaggctttcgctatcggcaaaacgataagtggaagtgggcagctgcagctcttctgccgccaggcgacggataccctcgcgattcatcgttaatttcgttgcgcgagcgcaggggacaacattcagtccttcctcttcaagttggatcagcatatcggtggcaatagcttcgatctccggcacgatataatgtggtttttccagttcaaccacacggcgtaatgcatcaccatcaagcatattaatgacatgggagcgatgcgcgacatgcatggctggtgcgtcggcatagcgatcgacggcaatcacctctacgccgagacgctgacactcgattgccacttctttacccagttcaccggagcctaataacatcacgcgagttgctgccggacgcagcgcagtgcctaataacgtcataacgaatatcccctgattaattccgcgcgcagtataaacgaaaacgtttgcgtgtgtctttattgctgatgttgatttctcaaccgaaaagaaatatactgtataaaatcacagttattatgagaggctgcaaatggcggttgaagttaaatacgtagtcattcgtgagggcgaagagaaaatgtcgtttaccagcaaaaaggaagccgatgcttatgacaaaatgcttgatacggcggatctgcttgacacctggctgacaaattctccagtgcaaatggaagacgagcaacgtgaagccctttcgctatggctggcagaacaaaaagatgtgctgagcaccattctgaaaaccggcaaattaccgtccccacaggtcgtcggtgctgaatccgaagaggaagatgcctcacatgcggcctgaagcaacttgcgctcctgacaatttgtaccatgctttctcctgaatcattgtgctatggagaaaaacatgaaaaaaagaggggcgtttttagggctgttgttggtttctgcctgcgcatcagttttcgctgccaataatgaaaccagcaagtcggtcactttcccaaagtgtgaaggtctggatgctgccggaattgccgcgagcgtaaaacgtgattatcaacaaaatcgcgtggcgcgttgggcagatgatcaaaaaattgtcggtcaggccgatcccgtggcttgggtcagtttgcaggacattcagggtaaagatgataaatggtcagtaccgctaaccgtgcgtggtaaaagtgccgatattcattaccaggtcagcgtggactgcaaagcgggaatggcggaatatcagcggcgttaatggcttctgataattcgattgaccgttggtggatgcggcgcgagtgccttgtccgccccagaacgcaccacaatcgtaggcctgagaagacgcaacagcgtcgcatcgggcaatcagcatcaaacaatgccactcaaaacgacaaactactttcacctaaaatacccttatcacctgatatacagtaaataccttacctggcgcgaatttctttgaataacggcctaccgccccgcttatttgcgcatcttttgtctcgatatacattttctgacatcctcatccgctatgctacaggcactaaaaatggttattgaggagcaaatatggctaactggttaaatcaactgcaatccctgcttgggcaaagcagttcttctacctcctcgtctgcggatcagggattgggcaaactgttagtgccaggcgcattaggcggactggctgggctgctggtcgcaaataaatcagcacgtaaacttcttacgaaatatggcaccaacgcgttactggttggcggcggagcggtagcgggtacggtgctgtggaataaatacaaagataaaattcgcgcggcgcatcaggacgaaccgcagtttggcgcgcaaagtacgccgctggatgagcgtacagaacgtttgatccttgcgctggtctttgccgctaaaagtgatggtcatattgatgccaaagaacgtgcggcaatcgaccagcaattgcgtgaagccggcgtggaagagcaggggcgtgtactcattgagcaggcaatcgaacaaccgctggatccacaacgcctggctaccggggtccgcaatgaagaagaggcgctggaaatctatttcctgagttgcgcggctattgatattgaccattttatggaacgcagttacctgaatgcactgggtgacgcgctgaaaatcccccaggatgttcgtgacggcattgaacgcgatctcgaacagcaaaaacgcactttggcggaataattccgctctctggatagcctgaagttgactatttcgggctatccagaaccgcacagccatttgaacaggctgagtttctctgtctgcataacattcgatatccgtgccattacctgtcatcatctaagcaatgactcccctgtttcgcttgcatccccggtgagttttgccacccttataagatgtttcaaccagaaagaacaataacatgctaccaaaagccgcccgcattccccacgccatgacgcttcatggcgatacgcgcatcgataattactactggctgcgggatgatacgcgttctcagccagaagtcctggactacctgcaacaagaaaatagttacggtcatcgggtgatggcctcacaacaagccttgcaggatcgcatcttaaaggaaatcatcgaccgcattccgcaacgagaagtttctgcgccctacatcaaaaatggctaccgctatcggcatatttatgaaccaggctgtgaatatgctatctaccagcgtcaatcggcattcagtgaagagtgggatgagtgggaaatattgctcgatgccaataagcgcgcagctcatagtgagttttattcgatgggcggaatggcgattacgcccgataacaccattatggcgctggcagaagattttctttcccgacgccagtacggcattcgttttcgtaatctggaaactggtaactggtacccggaactgctggataacgttgaacccagctttgtctgggcaaatgactcctggactttctactatgttcgcaagcatccggtgacgctgctgccttatcaggtctggcgtcacgccatcggtacgccagcatcgcaagataaactgatctacgaagaaaaagacgatacctattacgtcagcctgcataaaacgacctcgaagcactatgtagtcattcatttggccagcgccaccaccagtgaagttcgcctgctggacgcggaaatggccgatgccgagccgtttgtttttctgccgcgccgcaaagatcacgaatacagccttgatcactaccagcatcgtttttatctgcgttccaaccgccacggcaaaaactttggcttataccgtacccgtatgcgtgatgagcaacagtgggaagagttaattccgccatgcgaaaacatcatgctggaagggtttacgctgtttaccgactggctggtggttgaagagcgtcagcgcgggttaaccagtttgcgccaaattaaccgcaagacccgggaagtcattggtattgcctttgatgatccagcctatgtgacctggattgcctacaatccagaacctgaaaccgcgcgattgcgttatggttattcttccatgaccacaccagacactttgtttgaactggatatggataccgatgagcgtcgtgtattaaaacaaacggaagttcctggttttgatgcggcgaattaccgcagtgaacacctgtggatagtcgcccgtgatggcgtcgaagttccggtttcgttggtctaccatcgcaaacattttcgcaaaggacacaacccgttgctggtgtatggctatggttcttacggcgcaagtattgatgccgatttcagttttagccgcttgagtttgttagatcgtggctttgtctacgccattgtccatgttcgcggcggtggtgagctggggcaacaatggtacgaagacggaaaatttctgaagaagaaaaatacgtttaatgattatcttgatgcctgcgatgcattgttaaaactgggctatggctctccttcgctttgttatgcgatgggcgggagtgcggggggcatgttgatgggcgttgcaattaatcaacgcccggaattattccacggcgttatcgcccaggtaccgtttgttgatgttgtaacaacgatgcttgatgaatcaattcctcttaccactggtgagtttgaagagtggggtaacccgcaggatccgcaatattacgagtacatgaaaagctacagcccgtatgacaacgtcaccgcacaggcttatccgcatttactggtaacgaccggtttacacgattctcaggtgcaatattgggaaccggcaaaatgggtcgctaaattgcgcgagctgaaaaccgataaccatcttttattgctctgtaccgacatggactcaggccatggcggtaaatctggccgctttaaatcgtacgaaggcgtagcgatggaatatgcttttctggtcgcgctggcgcagggaacattacccgctacgcctgcggattaagtattttccagataatgtttcagtgttaaacgcagctccgggctcatgctgtccaggttattaaataaccagcgcagatagcccggatcgcgttcggcaacgtcggaaaccgctttgccacggtatttgccaaaggtgaaggtcgtcatcaacgacggacgtccggtgatatcggccatctgttctgccgtccagccggaggtgttcataatatcgataagcaacgcggcggtgatataacagtcatacaacgcgcggtgatgatgcaggcccggcggcgtctgtacattgagcttccgtgttttatataacgccatattgctgtacttgattcctggccacaagcgacgggccagtttcatggtgcaaatccactcaccgggcatctcaggcagtacgcggcggtcaaagctggcgttgtgcgcgacataccattcactgccgtaatagtgtgggatcacatcttcaatccacggtttatcggcgaccatggcttcggtgatgcgatgaatcgccatcgcttgtggactaataggacgatcggggcgcaccaggtggctcatggggttgacgatttttccgtcaatgacatcaacagaggcaatctcaacgatccctccctgcaaaccgcaggtttctgtatcgataatgcgcaacatggcatactccaggccgaaaaagcctagcgtaatggaatgatatcgccttgccaaccctgtgatgaacgctgaccgactaacaataatgaaccacgatcggcgcgaacgatgagacgaccatattcatcccatagtgcactgttaccacgggcatttgccatcagcacagcaatcgagtactgatgtgaaaaaaattgtaagcgacgggccgacgccagcaggtcgggttctcccagacattgccctgtcgtaaacagtgaacaggtcgggtccatatccataccttccggttgttcatcgaccaccgtgatggttctggaacgacggcccagacatgcaccatgactctgatggtagatcccaggcgtttttcgccacggtgcgaacaccgcaattccacgaataaagcgatcgttatattcaacgggaaggccggcaatgatggtcattcgccaggtcgttgcggcataacaaagcgggtctaacagtgagagatcgggtggggcaggaagggcacgtcgcgaataatcacaccccagtaaagaaagcgatggaaaaactaacagctgacattgttgcctggcggcggccctcacaaactccagatgatgagctacttgttcggtgagtgaggttttacgaggctcatattgcgctgctgcaactttccagaacgacataatgacttccttttcaaaatgactgcaaattatgggtgcggtttagaaaatactcataatttagcaggcgttatgtaagaaagtgtaaccctgtataagttttatttaagtttgggctcgtaaggtaaacgtgacagattgaccgaagccaaacggtgggcaataagccgctcgcgaaaccagctgcgcaaatgttcaggctgttcacgttcaaccgcttcagcgatcaccggcatattgtagcgttctttaaatgccaccccggccgccgccaaatcgacattcactttatccatttctgtttgatccagtttagccagattcttcagcattcttaatctcctcatcattcgcgggcaaaagttactaagagtgagccaggatggcaagccggaattgatgatcctcgactcagacattagacaaggttatgctctgtaaaaaagttattacaaaaaggaatagataatatggcttcaactgcacgctcccttcgctacgcgctggcaatcctgaccacttcgttggtgacacctttcgtctgggcacatgcgcatttaacgcatcagtatcctgcggcaaacgcgcaagtgacagctgcaccgcaggcaatcactttaaacttctcggaaggtgtggaaacaggattcagtggtgcaaaaatcacggggccaaaaaacgaaaatattaaaacattaccggcgaagcgaaatgagcaggaccaaaagcaactgattgttccactggccgattcgctgaaacccggaacctacaccgttgactggcatgttgtttcggtggacgggcataaaacgaaaggacactacacctttagcgtgaaataaatcatgctggcgtttacctggatcgcgctgcgatttatccatttcacctcgctgatgctggtttttggcttcgcaatgtacggtgcctggctggcccccttgacgattcgtcgcttgctggcgaagcgttttctgcgtttacaacagcacgctgccgtctggagtttgatcagtgccactgcaatgctcgccgttcagggcgggttgatgggaacgggatggacagatgtattttcgccaaacatttggcaggctgttttgcaaacgcagtttggtggcgtctggttatggcaaattgttctcgccctcgtaacgttgatcgtcgcccttatgcaaccgcggaatatgccacgtttgctgtttatgctcactaccgcgcaatttattctgctggcgggaatggggcatgcgacactgaatgaaggggtaacggcgaaaatccatcagactaatcacgcgattcacctgatttgtgcggcggcgtggtttgggggattactgccggtgctctggtgtatgcaactcatcaaaggccgttggcgacaccaggctattcaggcgctgatgtgtttttcatggtgcgggcattttgcggtgatcggcgtactggcaagcggcgtgcttaatgcattgttgattaccggatttccccccacgcttacgacttactggggccaactcttattgctcaaagccatcctggtgatgattatggtggtcattgcgctggctaatcgttatgttcttgtaccgcgcatgaggcaggaggaagatcgtgcggcaccctggtttgtgtggatgactaaactcgaatgggcgataggtgcggtagtgctggtgatcatcagcctgcttgcgactctcgaacctttttgatggattacgaaaatgatgaaaaaaagtattctggcgtttctgttactcaccagttctgcagcggcgctggctgcaccgcaggtgattaccgtcagtcgttttgaagtgggtaaagacaaatgggcgtttaatcgcgaagaggtgatgctgacttgccgaccgggtaatgctttgtatgttattaatccgagtaccctcgtgcagtatcctttaaacgatatcgcacaaaaggaagttgccagtgggaagaccaatgcccaacccatttcggtgattcagattgatgatcctaacaatcccggcgaaaaaatgagtctggcaccgtttatagaacgagctgaaaaactctgttaattacctaaaatagccttttgatttccaataaaaaaaccgcctcagttctttcaccagaacgggcggtttttaacatttaagctgatgaccaccgcgctttttattgaccattttgcacgcaaactggaaaacctggcgtcgtcatctattcttaaagggcaaggcaactaagcctgcattaatgccaacttttagcgcacggctctctcccaagagccatttccctggaccgaatacaggaatcgtattcggtctttttttaattgcatttgaaatcaattagttgcaaatgtctcccccgaaattccccgaaatttactcgaatttctgtattccggtctttttggttatatcacaaccaaaatacatttaacaatccatttacgttaaaatcagagcagtaagtacgttttttctctctcatcaagatacatttttgttgtcttctccgatgtgtggccaagtagacgctgagcaaattcttctccacatgtttctttgtacaatcgtccagccaggcttctgatctcgtgaaaagttggtgggttttcactgaactggatacctgtgaattttctggctgcgacaaatttttttgtcaggccatccgggtgaatgctgccgtcagggctgttttttctaatcccggcactgattagataatctccccggcttaccaggcggcatcgttcaactactgtaccaagccgtagaccagcgacaggaaggctgagtgacagggggatagcaatcatcattcctgtcttaatttgcctgacgtggagacgatcatcataaatatcactgaaccgcatattcgttatgtcttcgcgacgttgtcctgttacaagggctaaatccatagctaatgggaaccatgccggaagttgatctgctgcctccctgatgcagttgtatatctttagtttcagtcgttctcttgtaactactattttcggtgctcttgttggcgtgactggattttgagatatacgtccttcaacaatggcctcgcgaaacatatcagacaacacagaacgcattgatcctgccattgtgtttttccctccttcaatccacaaatcaagaaactcggcaatatggcgagtggttatttctgtcagtaaaatctctcccaatttttcttttattgtctccagttgatttgcccgaattttataagtatttctggacacttttctccttataagaatcgttttgtaacgttcaatccagtctgccatagtaaatgagtcgaaccctttaagtttttcaattaaggcagcgggagagtagtttttgtatatataatgatttgcttcaattgcctgcgttactgcatctcttcttgaaattttacctagtgtaaattcttctttcgtcagagggttgcgccagtaatatgctttgtctctccttcgatatgttaagtttctaggcaaattgggatcgtattttttccgctgcatgttttaacttctccattaacgggtaatgactccaacttattgatagtgttttatgttcagataatgcccgatgactttgtcatgcagctccaccgattttgagaacgacagcgacttccgtcccagccgtgccaggtgctgcctcagattcaggttatgccgctcaattcgctgcgtatatcgcttgctgattacgtgcagctttcccttcaggcgggattcatacagcggccagccatccgtcatccatatcaccacgtcaaagggtgacagcaggctcataagacgccccagcgtcgccatagtgcgttcaccgaatacgtgcgcaacaaccgtcttccggagactgtcatacgcgtaaaacagccagcgctggcgcgatttagccccgacatagccccactgttcgtccatttccgcgcagacgatgacgtcactgcccggctgtatgcgcgaggttaccgactgcggcctgagttttttaagtgacgtaaaatcgtgttgaggccaacgcccataatgcgtgcagttgcccggcatccaacgccattcatggccatatcaatgattttctggtgcgtaccgggttgagaagcggtgtaagtgaactgcagttgccatgttttacggcagtgagagcagagatagcgctgatgtccggcagtgcttttgccgttacgcacccccccgtcagtagctgaacaggagggacagctgatagaaacagaagccactggagcacctcaaaaacaccatcatacactaaatcagtaagttggcagcatcacccattaacggactgtctctcccttgtcgcccattaggctgatggtgtgttatatcggtatcaaccttatttgggttgatatagaaagcctccggaaccaccctgtaactcctcccgtgtagttcaggtgcaggataaatgtttccattccttgcccatcgtctcagcgttgatattgatggtgggttatccggatatctgagttttccccacgttttgagtgtcacaagattcattgccatacctctcacgatatgaccgccagtaaatatacagaatactggcgggtgtggttgatttttaataatcagctatgaagttctaatctggatataatgaaattcacgaggactgaagtttctcgcaattaaaatttatcagttttactttctgctctctggaagcgcctgcttctttttcccctgagagcattttttcgcattctgatttcgttagttttttctttgagtatcttgtccagctggcaggagaaccaccttccttttcaatagtggctgtaattttatacatgaacacctccattaatattttcaaaaaccgtgtccaaaatgcacttggttttacaccggaatattctcatcgtatcctgcttgttgcgtttcgttttgtgtttgtggatccgggaatgcatattcaacgccttccagttcaatccatagtgcattacgaccagctttgattgtcggccagtccatacctttgattctttcccatgagcgggaggtgaatgttttttccagcaaatcagcttttgcgcgtttggcgtcgttactggtgcccccatggtgtttgttgagcaactcgataatttcatcaagtgcgatttcttttgcacgcttttcttttagccatgtcggtgtaccgtcgttggcaaataattcactgttatcccgtgaggtatcgatgccgaggtgttcacctcccaggttaagaaactcgatatgaggaagaaagtttttaaatgttgggtttgaaaatacctgtccatcaatacgggtggagcgatcttttagtattctggcggtgcgccacacctgaccggtttctatgttcatttgcttctccatctggatcaggatggagggttcataaccggtttctgtttctgctttcatttttataccggtttttgccaactggcgtttgccatcatcaccttcgaaaaagtcatactcatatcctgcacgcccgcacataataatgtgcgcctgactgttaacaaatcgatcggtaaagcgtcgccactcctgtttgagccacgcccagtctgaaaattccagtcctcgtttacggtttcggcgtctggcatactcgtcgcataatccggtccagaagtgactgatggagtcgatgatcattacggaaccgctgctttccgcttcattaatggcttcaagcagatcaacaaacgagcgggtttttgccgtaaataattcgatattttccgcatcaaagcggggtttaacccagtcagagcctgtttctgtgtccagaaacattaccgggcggttaccagcttcaattccccgttgccgcataagcattaccagaccaatagccagttcgcttgctgtgtaggttttgccgtcgccagcaaaccccataattcctgcttttagataggcctgtgtgtttattgctcgttgaaaaagcgccatagattttagtcctccaaatcaatatcaacctggtggtgggcaatggtttcagccatgtaccggatgtgttctgccatgcgctcctgaaactcaacatcatcatcaaatgcgtggctgattgcctgtttattggcaccgtggcgttgcaaatggtcgatgcagagcgattcaaacaggtgctgaggcagactgaggtgtactggcaatagcggacactaccatttgttctttttttaagcagccatctgatgatatttttccctgaaggctgccggggagatattccccagacgagagtgacgacgctgacgattgtagaaaatctcaatgtattcccgtattactgagatggcttcatcccggttattaaaacgatagtggctcaggctctcatttttcagcgttccccagaagctttccatcggagcgttgtcgtaacagttacctttacgcgacattgatgttttcagaccagactgctcctgtatgacccggtaatcgtatgcgcagtactgtgaacctcgatcagagtggtggattagcccggcaggtgggcgctggctcctgagcgccataaacagggctttacctgtcagctcttttgtcatgcgctctcccatggcgtagccgacaatttcgcacgtataaacatctttgatgccagcgaggtacaaccatccctcctgtgtggcaacatacgtcaggtccgccacccagacctgatttggtgctgtaggagcgaacgtctggttcagcagatttggcgcaactggcagattgtggttcgagttcgtagtcgctctgaacttgcgtttctgcttacagcgtagccttagctccttacgaagacgtgccagtcggtcacgaccaacgatgatgccattctctgccagctccgtctggagccgccgggttccatatgtttcgcgagtgcggatatgtgccaccttaatctccagttttagccgctcatcactttgttttctgtctgagggttcatgctgtacccagttgtaataaccgctcctggatacaccaaatacctgacacatcgcttcaatgggaaattgttgtcgccattgttcgattaacgcgtatttttcagcgactcctgtgcaaaatacgctgttgctttttttaatatatctcgctcaaggcgagcttcatttaacgccttacgcagttgcagaatttcagattccagttcagccaccgtgcgggaaccaggagtaccgagcccttttctggcggcggtaacccattgtcctaaagtgccttcaggaagagataatcgggaagcgccttcactgatcgaaagttgattttcaagaaccgttctgacagcttcggctttgaactctttagagtaacgttgggtttttctgctcattattagctccttctgatgccattctatttcaggaaggagtgtccgttaaactcaggctacctcagacctttttccaggtcgtccgccagttccgtttctttttcttcacgaacgatctgctggtagtgacgagcccatgccatttcttcaatacgatcaaaaatcgggtaagcgctcatcactggtcactccaaaattttcaagcttgttggcaatcatcattgcgatgtcagggattgcaggcgcataggctatgcacgcaggattcgcacataaaccgtaaaccgccgcaatcaacacctgtcttttccagttgagttcatcttcgccagtttcattattgctatcattatgctgatcgctgccagcgttctccggtaacaaatcatcagctttttccgttttcttcggctcttcttcctgtgcttcatctggttttttttcgtcaaaagtttcctgataagttgcgtctcccatcaccgcgccacagtcagggcagttatcctcgccagtctgattgcagggtgttccctcctccggttcgctgttctggtgctgtttatcttcagtctgtcgcacttcattttccgtttttttgacttcatttgaggagatatgatgaccgggaatccatttcggttcattcgggtcgctaatccctgaggtagcctgagtttaacggacactccttcctgaaatagaatggcatcagaaggagctaataatgagcagaaaaacccaacgttactctaaagagttcaaagccgaagctgtcagaacggttcttgaaaatcaactttcgatcagtgaaggcgcttcccgattatctcttcctgaaggcactttaggacaatgggttaccgccgccagaaaagggctcggtactcctggttcccgcacggtggctgaactggaatctgaaattctgcaactgcgtaaggcgttaaatgaagctcgccttgagcgagatatattaaaaaaagcaacagcgtattttgcacaggagtcgctgaaaaatacgcgttaatcgaacaatggcgacaacaatttcccattgaagcgatgtgtcaggtatttggtgtatccaggagcggttattacaactgggtacagcatgaaccctcagacagaaaacaaagtgatgagcggctaaaactggagattaaggtggcacatatccgcactcgcgaaacatatggaacccggcggctccagacggagctggcagagaatggcatcatcgttggtcgtgaccgactggcacgtcttcgtaaggagctaaggctacgctgtaagcagaaacgcaagttcagagcgactacgaactcgaaccacaatctgccagttgcgccaaatctgctgaaccagacgttcactcctacagcaccaaatcaggtctgggtggcggacctgacgtatgttgccacacaggagggatggttgtacctcgctggcatcaaagatgtttatacgtgcgaaattgtcggctacgccatgggagagcgcatgacaaaagagctgacaggtaaagccctgtttatggcgctcaggagccagcgcccacctgccgggctaatccaccactctgatcgaggttcacagtactgcgcatacgattaccgggtcatacaggagcagtctggtctgaaaacatcaatgtcgcgtaaaggtaactgttacgacaacgctccgatggaaagcttctggggaacgctgaaaaatgagagcctgagccactatcgttttaataaccgggatgaagccatctcagtaatacgggaatacattgagattttctacaatcgtcagcgtcgtcactctcgtctggggaatatctccccggcagccttcagggaaaaatatcatcagatggctgcttaaaaaaagaacaaatggtagtgtccgctattgccagtacacctcagaatccggggaggcccgggggcgggcctctgtttttccggagtcagtccggtctgtggtttatgcgatgtgattatgaatggtgcagttgtgagccgttttcaggcaatcgcagggccagtacctcgtcagtcagctgacggtaaatctgctgttcagtctcacgcatcacctgtgcaccggcttccctctccgcatccgcatcaccgctcagacctgatgctttcagccggtcagccaccctctgagggtactcattctccagcatctcatatttctgctcttctgccagcgcccagcggtcagcttccgtacgcttcagtacagcatgccatggtccccagagggagaaccagtccgtaaattcattctcttcacggcttctgaccatggcttcggcagtgcggaggtcatttgctgtcactcccgacacgccatagaaacgcatttccttcacggcagtggagagctgaagtttctctgcgagcatggtctggaaggccaggtagacttctatctcatccacaaaatggagagttctgactttatcccgggcaatgtcctccagaatttcgaggcggaacatttccctgcccagggagagcagagcgccggtatcattatcgaaaaggccttcagatgcctgatggaccaggagggttttccggagattgttccatgtgagcgcgacacggtcctcacagctctcagtggcatcagcagcaacagcgaaagactgctgtcgaagctccgcagaggcactgagtttttccagccatgcagcgacctgttcacggaatccggaggtattgcgtgcagagacggtatcggaaaggcggtcaaggaacgcggaaaaggtgttggcgtgctcttcatgttcaaaagcatgccatatctgtgatacatcagattgtttgttttccgggaaccatgctgtcacggcatcagccagggggcgatggagtgtattctgttgtccgtcactcatggagaagtaaatccgtgggccgtggtagtccggttgggcggtttgttgcgacagagactccctgatccgtgaggacagaggattgtcttcgaggatgatagtgcaggtcggatcaaggctaagtatattttccggaatgtatgtgatgcgattctcgcggcaccggaaaaatatctcggtttcctctgagtgatgatttcttacaggtacggctggtaggctttccagaagattagtacttacatcgagcgcttccagtgattcaggtaactcagggagaaatgtcagctggttatttcttactgagagcacttccagcgatgtaggtaattcaggaagcatggttagctgattgttatctgcattaatatattccagcaatgcaggcaattcaggaagcatggttagttggttgttatctacatcaagatgtttcagagatgcgggtaattcaggaagtgttgacaggtgattgtcacaggcgtcaaggtattccagcgatgctggcaattctggtaatgatattagggcattctgagtaatttccagaacagtgatttgaggtggtaagttgtcaggtagcgaggacagatttaaacgattcagttgaagctcactgaactgattgatgagacattctttaagtagggagaccgcttcattccgattttcaccggggagcgcttgtttttcccatttatcccatgctgaaaagtaatcagcatatgtaccggaaatagtgttataaaaagaattttgggacaatgaaaagttattatttatcggtaacatgatggacattcagttaaagccgatggacaaatggctttgttaaaagaaataagtaggagtttttatgaagttcattccatgaaatgaacttcagcacttttttattataaaaggacaaacaaaattggctgtaaaaaaacgatactgtttcagttaactgtgaatagtgaggtgtactggcaatagcggacactaccatttgttctttttttaagcagccatctgatgatatttttccctgaaggctgccggggagatattccccagacgagagtgacgacgctgacgattgtagaaaatctcaatgtattcccgtattactgagatggcttcatcccggttattaaaacgatagtggctcaggctctcatttttcagcgttccccagaagctttccatcggagcgttgtcgtaacagttacctttacgcgacattgatgttttcagaccagactgctcctgtatgacccggtaatcgtatgcgcagtactgtgaacctcgatcagagtggtggattagcccggcaggtgggcgctggctcctgagcgccataaacagggctttacctgtcagctcttttgtcatgcgctctcccatggcgtagccgacaatttcgcacgtataaacatctttgatgccagcgaggtacaaccatccctcctgtgtggcaacatacgtcaggtccgccacccagacctgatttggtgctgtaggagcgaacgtctggttcagcagatttggcgcaactggcagattgtggttcgagttcgtagtcgctctgaacttgcgtttctgcttacagcgtagccttagctccttacgaagacgtgccagtcggtcacgaccaacgatgatgccattctctgccagctccgtctggagccgccgggttccatatgtttcgcgagtgcggatatgtgccaccttaatctccagttttagccgctcatcactttgttttctgtctgagggttcatgctgtacccagttgtaataaccgctcctggatacaccaaatacctgacacatcgcttcaatgggaaattgttgtcgccattgttcgattaacgcgtatttttcagcgactcctgtgcaaaatacgctgttgctttttttaatatatctcgctcaaggcgagcttcatttaacgccttacgcagttgcagaatttcagattccagttcagccaccgtgcgggaaccaggagtaccgagcccttttctggcggcggtaacccattgtcctaaagtgccttcaggaagagataatcgggaagcgccttcactgatcgaaagttgattttcaagaaccgttctgacagcttcggctttgaactctttagagtaacgttgggtttttctgctcattattagctccttctgatgccattctatttcaggaaggagtgtccgttaaactcaggctacctcatagcttgcttgcaccgtattgttcttgtttttcggttagttaaacatcgtacttcatatttgaacgttctgccggaatgcattatcaatagaggtaaagtcgcaaccccaaatcgtaaaggaaaccgtagcacgtcgtatgcaagaacgtgccacggctggctgatggatgttcgatagcgcgagtttgaatgaaaatcagccggagatgattttacataattgctacggaattattcaatacaggaattgcttgcgtctgcatggattgacctgaaatattcccgaaaatttctctaaaaaactcgaaaaaaatggtaactggttgaatgtattaatatgcaatggtacgtgtcagggattaaaagatgaacgtaaatttatttaacgcattaattttaaagggttttattgtttgttgacgaaaacaggaatcgtgttcggtctctttttatctgttaaaagccagaagcatttccttcgctgactttatagtcaaccataacacacactctactgtctgagtccaacgttttttaacattcttgttaaaattatgtgatctttagcgcgggaggaaaatattgatgaaacagcctgcgcccgtttatcagagaattgcgggtcatcaatggcgacatatctggctttctggcgatatacacggttgtcttgagcagttgcgccgcaaattatggcattgtcgttttgatccgtggcgagatttacttatctcagtgggagacgttatcgatcgtgggtaatgactccaacttattgatagtgttttatgttcagataatgcccgatgactttgtcatgcagctccaccgattttgagaacgacagcgacttccgtcccagccgtgccaggtgctgcctcaaattcaggttatgccgctcaattcgctgcgtatatcgcttgctgattacgtgcagctttcccttcaggcgggattcatacagcggccagccatccgtcatccatatcaccacgtcaaagggtgacagcaggctcataagacgccccagcgtcgccatagtgcgttcaccgaatacgtgcgcaacaaccgtcttccggagactgtcatacgcgtaaaacagccagcgctggcgcgatttagccccgacatagccccactgttcgtccatttccgcgcagacgatgacgtcactgcccggctgtatgcgcgaggttaccgactgcggcctgagttttttaagtgacgtaaaatcgtgttgaggccaacgcccataatgcgtgcagttgcccggcatccaacgccattcatggccatatcaatgattttctggtgcgtaccgggttgagaagcggtgtaagtgaactgcagttgccatgttttacggcagtgagagcagagatagcgctgatgtccggcagtgcttttgccgttacgcaccaccccgtcagtagctgaacaggagggacagctgatagaaacagaagccactggagcacctcaaaaacaccatcatacactaaatcagtaagttggcagcatcacctcgatcgtgggccgcaaagtttacgttgtctgcagttactggaacaacattgggtttgtgcggtaagaggcaatcatgaacagatggcgatggatgcgctggcatcccagcagatgtctttgtggttgatgaatggcggcgactggtttattgcgctggcagataatcaacagaaacaagcgaaaacggcgctggaaaaatgtcagcatttgccctttattcttgaagtacacagtcgtaccggcaaacatgttattgctcatgccgattatccagatgatgtttatgaatggcaaaatgaggtagcctgagtttaacggacactccttcctgaaatagaatggcatcagaaggagctaataatgagcagaaaaacccaacgttactctaaagagttcaaagccgaagctgtcagaacggttcttgaaaatcaactttcgatcagtgaaggcgcttcccgattatctcttcctgaaggcactttaggacaatgggttaccgccgccagaaaagggctcggtactcctggttcccgcacggtggctgaactggaatctgaaattctgcaactgcgtaaggcgttaaatgaagctcgccttgagcgagatatattaaaaaaagcaacagcgtattttgcacaggagtcgctgaaaaatacgcgttaatcgaacaatggcgacaacaatttcccattgaagcgatgtgtcaggtatttggtgtatccaggagcggttattacaactgggtacagcatgaaccctcagacagaaaacaaagtgatgagcggctaaaactggagattaaggtggcacatatccgcactcgcgaaacatatggaacccggcggctccagacggagctggcagagaatggcatcatcgttggtcgtgaccgactggcacgtcttcgtaaggagctaaggctacgctgtaagcagaaacgcaagttcagagcgactacgaactcgaaccacaatctgccagttgcgccaaatctgctgaaccagacgttcactcctacagcaccaaatcaggtctgggtggcggacctgacgtatgttgccacacaggagggatggttgtacctcgctggcatcaaagatgtttatacgtgcgaaattgtcggctacgccatgggagagcgcatgacaaaagagctgacaggtaaagccctgtttatggcgctcaggagccagcgcccacctgccgggctaatccaccactctgatcgaggttcacagtactgcgcatacgattaccgggtcatacaggagcagtctggtctgaaaacatcaatgtcgcgtaaaggtaactgttacgacaacgctccgatggaaagcttctggggaacgctgaaaaatgagagcctgagccactatcgttttaataaccgggatgaagccatctcagtaatacgggaatacattgagattttctacaatcgtcagcgtcgtcactctcgtctggggaatatctccccggcagccttcagggaaaaatatcatcagatggctgcttaaaaaaagaacaaatggtagtgtccgctattgccagtacacctcaaaaggacgttgatttgcatcaggtcttgtggagccgctcgcgattaggtgaacgccaaaaagggcagggaattacaggtgctgatcatttctggtttggtcatacaccgttgcgacatcgcgtggatattggcaacctgcattatattgataccggtgctgtctttgggggcgaactgactcttgtgcaattgcaataattaaaaatcaccgtactcctgtgcaggtcgccagaaaccatctataaaatcctcaatcggaaaacaaccgccatggcggatccgttgatcgctcatagaataaagacactgctgttccgtgttgtagacatccacaacaatatcttcacaaccgccatccaggtagcaaacaaaaagtaccagcgcgaacatttcatccccgaagtgtggtgccgtaccgttaagtttaggagagattttacaacgggggaataaccaggacaaataacccgccatcccgacgggttctttttggatcaggcaagacgcataatccaggcatcagattgttgatcgtaacgggtacggtaaaggacagagtgttcgccatttagcagggcagggatactggtttcagcatcccaggcatcgagttgcatacataaatcggggtcagatttacaaggaatggttaacgggtgatgctgccaacttactgatttagtgtatgatggtgtttttgaggtgctccagtggcttctgtttctatcagctgtccctcctgttcagctactgacggggtggtgcgtaacggcaaaagcactgccggacatcagcgctatctctgctctcactgccgtaaaacatggcaactgcagttcacttacaccgcttcccaacccggtacgcaccagaaaatcattgatatggccatgaatggcgttggatgccgggcaactgcacgcattatgggcgttggcctcaacacgattttacgtcacttaaaaaactcaggccgcagtcggtaacctcgcgcatacagccgggcagtgacgtcatcgtctgcgcggaaatggacgaacagtggggctatgtcggggctaaatcgcgccagcgctggctgttttacgcgtatgacagtctccggaagacggttgttgcgcacgtattcggtgaacgcactatggcgacgctggggcgtcttatgagcctgctgtcaccctttgacgtggtgatatggatgacggatggctggccgctgtatgaatcccgcctgaagggaaagctgcacgtaatcagcaagcgatatacgcagcgaattgagcggcataacctgaatctgaggcagcacctggcacggctgggacggaagtcgctgtcgttctcaaaatcggtggagctgcatgacaaagtcatcgggcattatctgaacataaaacactatcaataagttggagtcattacctggttaacgttcgatcacccggcgattcaccgtgtaattcgccgtcgtcgatttcaaaagcgcctatgcgcacactggttttcatcttcgtgctctccatttagctgccggttgtggtacgaccagtccgatcgcaccatttttcagcctagttgaggcagccgaatgtgccagtcaaaaagtgcgctttttttgtgcgctgtcaggcgttaccggtaaaaagtttcccatcgcgcaccagttcacgcggatagctgtttttcaatcgcgaaccaatccgtttggctaaaccaatcggttgatgctggaaagtaaccaacacgtcatccgccactggcgcggcttgcgggtaaacatcgcgcccgcgataccactcctccgcttcctgcggtgtcagttcaaaagcgttcacattgtcgggggtggcaagggcaataactgcttcatgctgccagcgataacctttgttgtgcgtttcggcaagtttaatccccaagcgagaaaatcggactttaccgatcagggcttcaatgcccaccgggaacaaccacagttctttgtcacgctgccagaggcgcaggttttcatcccagtttaagccaacacctgcagccgcctgacgaatttgtccagcttcgcgatctttcactgggctgaacggaaaattaccgactttgtatttgggggcgggtaaggcgggaatcgcctgagttttacgcagacgagcaacgaagaagccttcgcagtcgtaaatttgtgggaaaacatgcaaaaagccttcctcggtcagcgccttgtttgcaccagggaagagatcaccaagcggtaaaaactctactgcgtcggggtaagtctctttcagccacaggcaaacggcttcgttttcttcctggtttaaggtacaggtcgagtaaaccagcgtaccgccagggcgtaatgcatgaaaggcgctgtcgatcagttcccgttgggtagctgcgatttcctgattgctttctggtgaccagttttttagcgcatcgggatctttacgcaccacgccttcgccggagcagggagcgtccagcaaaatggcatcaaacatttctggcactgccgcaccaaacacgcggccatcaaaatgtgtgagcgcaacattactgataccacagcggctgatattggcatgtaacacttttacccgactggcggaaaactcattggcaagaattgccccttcgttattcatccgcgcggaaatttgcgtcgttttggagccaggcgcggcagcgacatccatcacccgctgtggtgcattaccgtcagcaaacaaggcggcgacgggcaacattgaactggcttcctgaatataaaacaggccacttaaatgctcggcggtactacccaatggcaatgcatcttcattgtcgcgttcaatccagaaaccttcttcacaccacggaattggcgtaagcgtccagccataaggagcggttaattgcaggaaatcagcaacggagattttcagcgtattaacgcgaatgctgcggcgcaacgggcgctgacaggcggcaagaaaatcatcaaaagagagcgtcgaaggcatcgcttcgcgcatttgcgtcagaaaggcgtccgggaaataaacggtgtgttgggccacgagcatataccactggcaaaaaaaacaggcgcgcagtttagcataaacgctccggcgcaggcacgccggagcagtgggcattatttgggaagcgcagtaccccattcacgccactctttcggttcactttcctgcaacaggaagtgcttgccttcctgggctttcggtgccagtggcgtacccggaggcgtggcgaaggcgatgccgccacggataaactggttaaaggtgccggttttcactacgccgcccgtcagaccaaagtccagactgtaacccgatgccaaccagaagacggaattgttacgcaccaggtgttgatagcgtttactgatgcgcatcgcaatcatcacgcgatctgacaatgtccccagcgtcattccggtaaccgtacctacttccagaccacggaacagcacaggcgtaccaatacctaacgaaccggcttccggtgcttcgacaataatgcttaagccatccaggtaacgcgaatcagtaatagtagcttcttgcaactcaaagtcacggcgaggattaccccgacctggttcgacattgatatacggctggaggatagtatctagatgctcaacgcccgcggctgaaatttgcggtgtgaccaccgagaagcgcgtaccgccgcgggcgaaggtctggacatactccggatagagcaccgcctttgcctgtacttcattgcgcgcggtaatcagatccagcgtctggatttgcccgatatcaataccgagatagcgaattggcatcccgaccgccagttttccggcatcgaaagcgtgaagcgtaatctgcccaccaaccgcacgggccgctgtttcggaagcatacagaattcgtttgtcgcctttacgctgactggcgctggcaccgctgaggttatcgaagctaatggctccctttaatgctctggagagcggggatgcctgtacggtcaggccactaccattcagctgaactttcgccccgccttctgcccagaacacgctattgctggtcagaaggttgcgatactccggcttaatatgcagatcgatatcaaacgcgttagctcgcggacgcacggtaatcacttcaccaacttcaaatttacggtacagcactaccgagcctgcctgcacatccggcagcgtctctgcactcaaactcacggttgtggtgggtaaatcgctaaggctgttctccagcgctttttccagattggcatacagtggatagctggctttcatctcacctttatcgcctggcagaatacgtatcccgccgttaatccattctgaggcgctggcaccaagaaactcaacgccatccagccccaccttcacgtcgacacggctgttgacgacaaatttgctatcgccttttaccagttcgcgatgctgaggctcgatggcgacggtaaaggtaacgcctttgctggtgagtttacgatcaataacctggcctacctgcacgccgtgaagaatgagcggctgaccagcatcaataccgtaactttccggcgcggtcagggtcagcgtcagaacatcaggttcatgcagcagtgctttttcgcctggcacaacaacgaactctttgcgtggctcgccatcgccgggtaccaactcgaaggttttgccagtcagcagggcgctgagattggcatcgctaagggataatttcggattaagtaattcgatgcgggtattttcacgaagcagggtaacgacgctgggattaactgtcatttccccagtgactttaccaccaggatttaaatccagtttagttagctgtccgacttccagtccctgatacattaatggcgtcgagtcggcggttaatccggccccactcggcagttccagtttgattattacgccacgctggctatgggcgaggtcttcatacagaccaaaggtatcttccgcctcggcaggtttcgactcttcaggtgaatcgaaggcaatcgcaccgttaaccagtgccgccagactttccagtttcaccttcgcgccactgatactgacgttggcatcaacgccggaaacgttccagaaacggctaccttttttcaccaggtcggtaaaacgccgctcgatcaggacatcaatcaccacgccttgcttgttgggattgatggcatagtcgtagacttttcccacagggatcttgcggaaatagaccaatgaaccgctgttcagcgaaccgagatcgggggcttgcaggtggatcatcagatcgccattgtccagtcgatatttcggttgggtatcgagtgcgacaaagtgatcctgctctttacctttacctggcatcatgccgatatagttaccaccgacgagggcgtccagcccggagacacctgccaacgatgcttttggcgtcaccagccagaactgagtctcttcgcgcagcgcatctttcatatcggacttgatgctgaccttgacttcaatcttacgaagatcgtcgctgaggctgatatcctgcactgttccgacttcaacgccctgataacgaacaggcgtacggcccgggacaataccatccgccgacataaagtcgatggtgacggtattaccccggtcctgataactgtcccaaatcagccaaccggcaatcattagcgcgatgaaaggcagcagccagaaaggtgagatacggcgtttatttttaatctgcgcttcagtcgtcgaagcgggcgtttcctgactcatgtgcatcccaaagtaagcggctgtccagccattccacagcaagaatagtcaaaattacggctgcgccaaaataaaacgcagccggtcccatagtaaaagcgaggatctgatcgcgattaatcagcgacatggttaaagatatgacaaacaggtcgagcatcgaccagcgtccaatccaggtcaccatccgcagtaacagaatgcgtgtgcgtaaaccttgctggcatttaaaatgaatgctcaacagtaaagtgaacatgacgatcactttagtaaacggtaccagaatactggcgataaacacgattccggcgaccgcaatgttgctacttgccagcgacataatcccggaaagaatcgtatcttcctgccggccaccattcagataaatgatagaaataggcaataggttggctggtaacaacaaaacgattgacgctaacagcgccgcccagcatttttgcaaactatgacgacgacgcaggcgtagcgggatatggcaacgcgggcagcgaccacgctgatcaggatagccggtaaaatggcacccaagacagacacgaagtttctcgtccctacgcgtagcggggagctgcggataatatcgctcccacagctcctcaacattaagatgtgacaacgtcaccgtcgttaaaatcaccaacgccacaaaagagaacaagccgacacccgcctggatatgggcataatcctgtacctttatagaagcaacgccaatgccgaccaggtagatatccagcattacccactctttaagacgctcaagcatcagcagtaccggacgtaaattcattcccagtcggttaccaaaccataaatatgctatggaggacaccagaatgaggggggcaccaataacgcagaaaaagaccatcgcccccgttatcgtatcgccctgtttggtcatttgccagatgccttgcatgacgttggcgtcgatacgaatacctaacagccagatatgcaacagcggttcgccccaggcaaacggcatcagcaacagcatggtgaaagccattgccgccaggcgcgttagcgaccagtcgcgcccgtcgcgaatttttgcctgacagcgcggacaataggcactctgatgagaatttatctcgggcaggctaaacagcatgtcacattgcgggcaacgttggtaatcaccacgcggcagttcctcgccgattgccctcactgttatcttttttgtcggcgtaatttgtggtgtgttaagagccatgacgtgccaaatgtaataagaattaacattaatcttaacccatgatgggaatgatcttgagcattaacgcatttaatgcttattttaataggctggcagttccaggtaagacaaacaagtgattatataatgaacaaaacagaattttacgcggatttaaatcgcgactttaacgcgctgatggcgggagaaaccagttttctggcaacgcttgcgaacaccagtgcgttgttatacgagcgtctcactgacgtaaactgggcaggtttttatttgcttgaggacgatacactggtactcggaccatttcagggcaaaattgcctgtgtccggatacccgtcgggcgcggggtgtgcggcactgcggttgcccgcaatcaagtgcagcgtatcgaggatgttcacgcgtttgacgggcatattgcctgtgatgcggcgagtaattctgaaattgttctgccgctggtggtgaaaaatcagattattggtgttcttgacatcgatagtaccgtcttcggtcgctttacagacgaggacgagcaaggcttacgtcagcttgtggcacagcttgaaaaagtgcttgcaacgacggattacaaaaaattctttgcgagcgtcgcaggataatcaacggataacgtagcatttactggtagcgtcattataatgacgcctgttcatgcctgcgcttgttggctacgtccgttgtaatcaggaaatttcatggaaaatcaacctaagttgaatagcagtaaagaagtaatcgcgtttctggccgaacgttttccccactgtttcagtgcggaaggtgaagcgcgtccgctgaaaatcggtatttttcaggatttggtcgatcgtgttgccggggaaatgaacctgagcaaaacgcaattacgatccgctttacgtctctacacttcgagctggcgttatctttacggtgttaaacccggcgcaacgcgtgtcgatcttgacggcaacccatgcggtgagctggacgagcaacatgtagagcatgctcgcaagcagcttgaagaagcgaaagcgcgtgttcaggcacagcgtgctgaacagcaagcgaaaaaacgcgaagctgccgcagctgctggtgagaaagaagacgcaccgcgccgcgaacgcaagccacgtccgaccacgccacgccgcaaagaaggcgctgaacgtaaacctcgtgcgcaaaagccggtagagaaagcgccaaaaacagtaaaagcacctcgcgaagaacagcacaccccggtttctgacatttcagctctgactgtcggacaagccctgaaggtgaaagcgggtcaaaacgcgatggatgccaccgtattagaaatcaccaaagatggcgtccgcgtccagctgaattcgggtatgtctttgattgtgcgcgcagaacacctggtgttctgaaacggaggccgggccaggcatgaacatgttttttaggcttaccgcgttagctggcctgcttgcaatagcaggccagaccttcgctgtagaagatatcacgcgtgctgatcaaattccggtattaaaggaagagacgcagcatgtgacggtaagtgagcgcgtaacgtcgcgcttcacccgttctcattatcgccagttcgacctcgatcaggcattttcggccaaaatctttgaccgctacctgaatctgctcgattacagccacaacgtgctgctggcaagcgatgttgaacagttcgcgaaaaagaaaaccgagttaggcgatgaactgcgttcaggcaaactcgacgttttctacgatctctacaatctggcgcaaaagcgccgttttgagcgttaccagtacgctttgtcggtactggaaaagccgatggatttcaccggcaacgacacttataaccttgaccgcagcaaagcgccctggccgaaaaacgaggctgagttgaacgcgctgtgggacagtaaagtcaaattcgacgagttaagcctgaagctggcaggaaaaacggataaagaaattcgtgaaaccctgacacgccgctacaaatttgccattcgtcgtctggcgcaaaccaacagcgaagatgttttctcgctggcaatgacggcgtttgcgcgtgaaatcgacccgcataccaactatctttccccgcgtaataccgaacagttcaacactgaaatgagtttgtcgctggaaggtattggcgcagtgctgcaaatggatgatgactacaccgttatcaattcgatggtggcaggtggtccggcagcgaagagtaaagctatcagcgttggtgacaaaattgtcggtgttggtcaaacaggcaagccgatggttgacgtgattggctggcgtcttgatgatgtggttgccttaattaaagggccgaagggcagtaaagttcgtctggaaattttacctgctggtaaagggaccaagacccgcactgtaacattgacccgtgaacgtattcgtctcgaagaccgcgcggttaaaatgtcggtgaagaccgtcggtaaagagaaagtcggcgtgctggatattccgggcttctatgtgggtttgacagacgatgtcaaagttcaactgcagaaactggaaaaacagaatgtcagcagtgtgatcatcgacctgcgtagcaatggcggtggggcgttgaccgaagcggtatcgctctcaggtctgtttattcctgcgggtcccattgttcaggtccgcgataacaacggcaaggttcgtgaagacagcgataccgacgggcaggtgttctataaaggcccgctggtggtactggttgaccgtttcagtgcttcggcttcagaaatctttgccgcggcaatgcaggattacggtcgtgcgctggttgtgggtgaaccgacgtttggtaaaggcaccgttcagcaataccgttcattgaaccgtatttacgatcagatgttacgtcctgaatggccagcgctgggttctgtgcagtacacgatccagaaattctatcgcgttaacggcggcagtacgcaacgtaaaggcgtaacgccagacatcatcatgccgacgggtaatgaagaaacggaaacgggtgagaaattcgaagataacgcgctgccgtgggatagcattgatgccgcgacttatgtgaaatcaggcgatttaacggcctttgggccggagctgctgaaggaacataatgcgcgtatcgcgaaagatcctgagttccagaacatcatgaaggatatcgcgcgcttcaacgctatgagggacaagcgcaatatcgtttctctgaactacgctgtgcgtgagaaagagaataatgaagatgatgcgacgcgtctggcgcgtttgaacgaacgctttaaacgcgaaggtaaaccggagttgaagaagctggatgatctaccgaaagattaccaggagccggatccttatctggatgagacggtgaatatcgcactcgatctggcgaagcttgaaaaagccagacccgcggaacaacccgctcccgtcaagtaatatcaatcaggcacaagaaattgtgcctgattttttaacagcggcaagatgccgtaaatcagatgctacaaaatgtaaagttgtgtctttctggtgacttacgcactatccagacttgaaaatagtcgcgtaacccatacgatgtgggtatcgcatattgcgttttgttaaactgaggtaaaaagaaaattatgatgcgaatcgcgctcttcctgctaacgaacctggccgtaatggtcgttttcgggctggtactgagcctgacagggatacagtcgagcagcgttcaggggctgatgatcatggccttgctgttcggttttggtggttccttcgtttcgcttctgatgtccaaatggatggcattacgatctgttggcggggaagtgatcgagcaaccgcgtaacgaaagggaacgttggctggtcaatactgtagcaacccaggctcgtcaggcagggatcgctatgccgcaagtggctatctaccatgcgccggacatcaacgcttttgcaaccggtgcgcgccgtgatgcctctctggttgctgtcagcaccggtttgctgcagaacatgagcccggatgaagccgaggcggtaattgctcacgaaatcagccacatcgccaatggtgatatggtcaccatgacgctgattcagggcgtggtgaacaccttcgttatctttatttcccgtattctggcgcagcttgccgcgggttttatgggcggaaatcgtgatgaaggtgaagagagcaacggcaacccgctgatctactttgcggttgcaacggttctggaactggtgtttggtattctggcgagcattatcaccatgtggttctcgcgtcatcgtgaattccatgctgatgccggttcggcaaaactggttggtcgcgagaaaatgattgccgcgctgcagcgcctgaaaaccagctatgaaccgcaagaagcaaccagcatgatggctttctgcattaacggtaagtcgaaatcgctcagtgagttgttcatgactcacccgccgctggataaacgaattgaagctctgcgtacgggtgaatacctgaagtaatatgaagtaaatactaaaaagcgcgtcctgatcgacgcgctttttttatgccctggatcgtggctgagtgatacgtaaaccactgacacaggcagcaatcactgccagaatagccgcagccatcagcgaaacgtgcgtaccattatcaccgaactgatttagcatcagcgccaccagtgccgcgccgctactctgacccagtagacgagccgttcctaacatgccactggctccaccgctacgttcgcgaggagcggaggtaataatggtgtggttattgggtgactggaacaagccaaatccagcgccacataagatcatcggccagataatattgatatccgcaggtgacgcgggcagcagaaccaggggaaaaagccccgcagccatgatgaacaaccctagagcacccagcaatcctgcatgtacgcgttcaatcaaatagcctgccaacggagccatcaccatcgttgctaacggccacggtgtcagaagtaaacctgtttcgacttcactacgcccgagcacggtttgcaggtaaaagggcagggaaaccattgccagcatttgtgcgcagaaagagcaaacagatgtgcaaatagaaagtgaaaacagcgggatacgcagtaaatccaccggtagcagcggtacgggaagagaaagctggcggcgaataaagaaaataccaacaacaaccattaccaccagttccgcagcaattaacgtcagcgattgcccctgagcgaaaccactcaacgcagtgataagcaggccgaaggttaacgcgttcatcacggcgctgggcaggtcgaaacggggtttactggcgcgagaaccattgggtggcagaaaacgcatcgccagaagcagggcgataatacctaacggtacgttgattaaaaataaccatttccaggatgcgatggagaggattgctgcagcaattgtcggcccggcagcagaagagacggcaacaatatggcgattgttggcagggcgacgttggcgattgcgccgtcaaggacagccatcgaaatgccaatcacaatggttaatatcgcaccgtatcgctggggcaatggcaggccgtcggcctgaacttttggcataggaattttatatctttggtgaataatcaacaggggtatgattctagcactgatattcacggtggatgtcgcagaattgtaactaaccggcaaaagatggattgcgaccaccctggtgcgaaattataataaaaaacagttctgatttttataaaacactcgcaatgaggtgataaatggctaacgcagatctggataaacagcctgattctgtatcttccgtgctaaaagtttttggcattttgcaggcgctgggtgaagagcgcgaaatagggataaccgagctgtcgcagcgcgtcatgatgtcaaaaagcaccgtttatcgctttttacagaccatgaaaaccttaggttatgtggcgcaggaaggggagtcggagaaatattccctgaccctgaaattgtttgaactgggcgctcgcgcgttacaaaacgtcgatttaattcgtagcgcagatatccagatgcgtgagatctcccgcctgaccaaagaaactatccacctcggcgcactggacgaagacagtattgtttacattcacaaaattgactctatgtacaatttgcgcatgtattcacggattgggcgtcgtaatccgctgtacagcaccgcgattggtaaggtactgctggcatggcgcgatctcgatgaagtgaagcaaattcttgagggcgtggagtataaacgcagtaccgagcggaccatcaccagtacagaagcgttattacccgttctggaccaggtgcgcgagcaggggtatggcgaagataacgaagagcaggaagaagggctgcgatgcattgcggtaccggtatttgatcgctttggcgtggtcattgccggtttgagcatctccttcccgacgttgcgtttctctgaagagcgtttacaggaatatgtcgcaatgttgcataccgcagcgcgcaaaatttctgcccaaatgggttatcacgactatccgttctgatgagagtaagaacctgtcggaatatcaaacagacaggttctttatttagcatgagaaaaataaagttgaaggtgcgttatattaaacgcgcttgctataagaatattttactcatgagtgagaatctggttgtttattacccttaaccattatcgaccacgatattgcttttacgtaacagtgggcaatctgttatccccaagaaaccacttttagtgtgcaagtattgtaccgtgctggtgcctctggcagtcagataggtacattgcaaacctaatcctgcggcattctctttgcttccaatcaaaacgccatatccgctgagtaataatcctatccataccagtgctatcagcataactgtgcgaatgatgaatcgcattacaacctcttctctttttatgttcgcttaatcgtagcggcaatatgcgctgaagcaagctactcattccgaaaaagcacgaatatcgacatagttaggcgctgtttaactaacgcatgctagtttaatgacataaggtaggtgaagcggagattggagtgaaaaagtttcgatgggtcgttctggttgtcgtggtgttggcttgcttgctgctttgggcgcaggtattcaacatgatgtgcgatcaggatgtacaatttttcagcggaatttgtgccattaaccagtttatcccgtggtgatatcattttttcagcactagattttcttcctctccagcagtggtagaatagcgcctctactcagaggtggtgaaatgaacgaagttgtaaattcaggcgtgatgaacattgcgtctttggttgtatcggtggtggttcttcttatcgggctcatcttgtggttttttatcaatcgtgccagttcacggactaacgaacagattgaactgcttgaggcgttgctggatcagcaaaaacgtcaaaatgcactgttacgtcgtttgtgcgaagcaaacgaaccagagaaagcagataaaaagaccattgagagtcaaaaatcggttgatgacgaagatattattcgcctggtcgccgaacgataatccttcctcaatcttgagtaaccccgtcgttgaagggttactcaattcatcctgattatacgcactgtcatggtgcaactgcttcaaattaaaactctggtctgacttcaaataattatcatattatttatttgcgtaacgggatatcagaaaaagatattttcctcattaatttattaggatgtttacatcggatttgtgattaagcgtggtattatttattagcgaaacgtttctctcttgatttttttgctcattcatcaatttttcttattttaaattttcaatccctttggggattgacttctctttagggtaattgatagccgttaaccgactgttttatgagaaaaagtgatataactttttattcattgcatagcaaaaaatgtgatattgcacgcactatgtaataacttctcccactggcctggaacaactgaacttattgaactatgttagaaaatacgccagtttaagtatctgcctgaactggcaaggttaagcacaatgatatatcggcgcgtattccgttgcataagtgtgcaaaaaaagtggaagacgtatcgagatttgtgcgtctgatcgagacatgtttaaaaatggcttgccataattaacgttgtatgtgataacagatttcgggttaaacgaggtacagttctgtttatgtgtggcattttcagtaaagaagtcctgagtaaacacgttgacgttgaataccgcttctctgccgagccttatattggtgcctcatgcagtaatgtgtcagttttatctatgttatgcctgcgggcgaagaaaacaatctaaggaatttttcaaatggcaaagattaaaggtcaggttaagtggttcaacgagtctaaaggttttggcttcattactccggctgatggcagcaaagacgtgttcgtacacttctccgctatccagggtaatggcttcaaaactctggctgaaggtcagaacgttgagttcgaaattcaggacggccagaaaggtccggcagctgttaacgtaacagctatctgatcgaatccactgatctgaagtgtgaatacgcttcaatctcgctataaagcctcgtcgaatgcgaggctttttactatgctttatcttcgctcctggcgttcggatatttgcccgccgcgtgattcgcgttacacttgcggcctttagtatcctgccggagttgtcatgtctttttcctgtccactttgccatcagcctctttcgcgtgaaaaaaacagctatatctgtccccagcgacatcagtttgatatggcgaaagaagggtatgtcaatctgctgtccgttcagcataaacggtctcgtgatccgggcgacagcgcggaaatgatgcaagcacgccgcgcattcttagatgccggacattatcagccgctgcgtgatgcaattgtcgcccaactgagggaacggcttgatgataaggccacggcggtgctggatattggctgtggtgaagggtattacacacacgcatttgccgatgcgttgcccgaaatcaccacgtttggtctggatgtttcgaaggtagcgataaaagcggcggcgaaacgctatccgcaggtcactttttgtgtcgcttccagccaccgtttgccgttttccgataccagtatggacgccataatacgtatttacgcgccgtgtaaagcagaagaattagcacgagtagtgaagcccggcggctgggtcattactgccacgccgggaccgcgacatttgatggagctgaaggggctgatttacaatgaagtacatcttcatgcacctcatgcagaacaactggaaggttttacattacagcagagtgcggagttgtgttatccgatgcgtcttcgcggtgatgaagccgtcgcattattgcagatgacgccgtttacctggcgtgcgaagccagaagtctggcaaacactggcagcaaaagaagtgttcgactgccagacggactttaatattcacctctggcagcgttcttattaaccgtggaagtgcgtccagaggatctggacgccgatgccgatcagtaccagcccgccgagaatttccgcttttttcccaataattgagccgataaagcgaccaaccatcatccctaatgttgacataatcaaggttgcacaaccaatggccaatgcggtcgcgataatgttgacctgcaggaaagcaagaccaacacccacagccatggcatccaggctggtggcaatcgcggtggttaccagtagccagaaaccgtgtcgacggcgcggctcttcatcttcatcatctgcgccacgaaaaccctcaataatcattcgcccgccgaggaatatcagcagcacaaacgcaatccagtggttccattcaaggacaaaccggctggctaacatgcccattccccagccgatcagcggcgtcagggtttcgacggcaccaaaaataaggccggttcgcaatgcttcagaaaatttcggtttatggagggtggcacctttaccgattgatgcagcaaatgcatccatcgacataccaaacgcaagaagaacagtagcagtgatattcatgacaatgtcctgaccggggtatccataaaacacatcatcgcccccagcaaacatgcatacatgaacaacaagccgtgatggttttcgcgttcatgcaggcatagcgattgatgtgcatatggtctcgcctgactgaaagtattcagtccgtacgtgccacgttttgcaacgagtatgttgacacgtacatttccggaatctggaaatcggctactccccaaatgagggcgcaaccttaacatattttgagaatataaaacaactgttggaatatattatttcattgctttattgataacgattttcatttggatttatatatcaatgaaacgttaaaataaataacaaataagggaagaggtaatatagcctaagctatgtctgattattaaaaatacactaaacatagctttggctaaattcataacttattgagttgaaacgagaagcttataaattttttccagatcgtcgatatttcgaacgcggattaacagccgacgctgttctaattgcatcaccaacacgccatcttccgacaagttcatcgctttgattcggctatattcaatccagacattggcgaagaaaaaacctttttgtttaaagatgatcttcggaacgcggatccagaatatataaaaacccatcagagccagtgcgcttaataaccatgtcgttattaacgcaccatgattcgtgacgttgttatagataagaatgacaatcaatccgacgaagataacgctatcgatgcgaccacgccggagcaaaggaattgccagcagggtggggccgttacggcggggcatgatgaactgatcgtagatcgcgaaggccaggagtgcggcgatgaaaagaatcagtaccaggtccgtgattgtcattaatcctccagataaaaaaacggggccaaaaggccccggtagtgtacaacagtcttacagtcccagcaggccgcaagcgtaaccagcgataccgatgacgaagaagccaacgatgatccacagcgggttaacttttttgcgcagtagccacatacaagcaaaggtcagcagcagtggtaccaggcctggcattaactggtccagaatagtctggacagtagtaacgtgttctttgcccgtctggtcagtaatgcgagagacaaccagcgggatgttgacatgtgtccacttgttaaccaatgcccccatgacaaacaggccgaggatagacgccccttccgtcagtttttgcaggaagccaccacccatatctttaacgatatcgatacctttggagtaaccatacgctacgccgtagtaacgggttgccagacgcaccaggttaaacaggatgaagaacagcagcggacctaacaggctgccgctcatcgcgataccggcacccagtgctgcaaataccggacgtacggttccccagaagatcgggtcgcctacaccagccagcggccccatcaaaccgactttgataccgttgatagcaccgtcgtcgatctctgcgccattagcacgctgttcttccagcgccagggttacgccgagaatcggcgcagccacgaacggctgggtgttaaagaactccaggtgacggcgaatagcttgtttacgagcttcgttgttctcagggtagaggcgacgaattgccggtaccatagagaagcagaaacccagtgcctgcatacgttcgaagttccatgaaccctggaagaggttagaacgcaggaagacgccacgaatatcactttgagtgagttttttctcggtggtagtttgagttgtatcaaccatttcgctcacctgttagtccagttcgttatcgagatcgttgttaccagctgcctgagcaggcgcaccggctacgcggttgtatttcgggctaagttggatgtagagcactgccataacagtaccaatcacacccagagcaaccaggttaaagttggtgaatgctgcggttacgaagccgaggtagaagaacggcatcaggtagccagcacgcatcatgttgataaccatcgcataaccaaccaccacgatcatgccaccggcgatattcagaccattggtcaccacttccggaatcgcattcagcatgttctgtacttcgctggtaccaacagacagcgcaacgatgacggccggaatagccacacgcattgcttgcaggaacagagaagaaacgtggatccaggaaatcgctgtcaggttgccgttatcagcagccttatccgcagcgtgctggaaagcaacggtaatagtacgaacgatgatggtcagtacctggcccgcagcggccagagggattgccagtgcgatacctgcaccaatgctctgatgacctgcgataaccagaatggtagaaatgatagaagccagagcggcgtcaggcgcaactgcagcaccgatgttcatccagcccagcgcgatcatttccagcgtaccaccgataataataccggttttcatatccccaagaacgatacccaccagggtacacgcgattagcggacggtgaaactgaaattcatcgaggattgatcccatacctgcgatacaggctacgataaataccagcacaatttgaagagtggtaatctccattgtacttctcctgtttacgtaagacttaagtgtgaaaactgagtgataatcaacacaatacgttacttatcgattttgctgatcagatccatcattttcagtttcggatcggtggaaaccttacggacttccagctcaataccgcgcgcattcagtttcttgaacgcctcaatatctttttcatcaaccgaaaccgcgttattcacctgggttttaccctgacggaatgccataccaccgacgttaacagaggtgattttcacgccgccttcaacgagacgctctacatctgttgggttggtaaataacagcattacgcgttcgccagcatatttcgggttgttgtagacgcgaatcattttggcaacatcaactacgtgtgctgttacgcccggaggtgcaacctgggtgagcagtgtcttacgaacggtatccgcagccacttcatcactaacaacaataatacgggagacattggtttctttggtccagcgggtggcgacctgaccgtgaatcagacggtcgtcgatacgcgcaaggccaataaccatgtagtcgtttggccccattggttttgccggagttggagccgcttttggtgctgcggcagcgggtgctggcgcggctttttcaaccggtttggctttcagtgctttcacgccttcacggcctgtttctactgccagcgcaaccagttcatcaaagcttgggtcatcatcacgagccattaacgtttccacgagcattggaatgttaacgcctgcaatgacttcataatgctctttgtcgacgacaatgcggctggcagcattgaacgggctgcctccccatgtatcaacgagaaacagcacgcctttagtggtgtcgagttttgccaactgagcgttgtacttttcaatcagcgtttcggcattttcacctggaacgaaatcgatccagccgacgttttcctgctcgcctaacagcatttctgccgttttaagcaactgctctgcagcccaaccatgtgtgcctataacaatagcaatggtcacttgctacctcctttattatcgttaacacctcaacgtgccagatgtatttttgaatcgtcgtccacaatcgaatcgattcagataagggctacaaccaaaaacccctgcgtttcgcgatttattttagatatcgaaaaaattattttatgtgatgaagatccgtaatttaactttcgattagcagaaatttcgaaaggtaaaatatccttgtcacattcgtttgcaaaggaaggtaaatctttgccaaatcagaggcgtctctgatatgtttaactcccgtttaacaaccatggagtatagggcagtagcccgcagtatggatcgtcaccgacgtcatttcagcatcaggccttttaacgcctgcctttctggcactctatgccgcacctttcgtttgcattttgtcgttacgcctgcattatttctggcgtcgaatagctattccttaagcaggagcttgtcatggaattcttaatggacccctcaatttgggcggggctactcacgcttgttgttctcgaaattgtgctgggtatcgataacctggtcttcatcgccattcttgctgacaaactgccgccaaaacaacgcgataaagcgcgtttgctggggttatcactggcgctgattatgcgtctggggctgctgtcgctgatttcatggatggtcacgctgaccaaaccgctatttaccgtcatggatttctccttctccggacgcgacctgattatgttgttcggggggatattcttgctgttcaaagcaacaaccgaactgcatgaacggctggaaaaccgcgatcatgattccggccacggtaaaggctacgccagtttctgggtggtcgtcacacagattgtcatccttgacgccgtcttctcgttggatgcggtaattactgcagtagggatggttaaccatctgccggtgatgatggcggcggtagtgattgcgatggcggttatgttgctggcatccaaaccgctgacgcgattcgttaaccagcaccccacggtggtggtgctctgtctgagcttcctgttaatgattggtctgagtctggtggcagaaggtttcggtttccacattccgaaaggttacctgtatgccgcgattggcttctcgatcatcatcgaagtgtttaaccagattgcgcgtcgcaactttattcgccaccagtcgactttgccgctgcgagcgcgtactgccgatgccatcctgcgtttgatgggcgggaaacgtcaggccaatgttcagcacgatgccgataacccgatgccgatgccgatcccggaaggtgcatttgccgaagaagaacgttacatgattaacggcgtactgacgcttgcgtcgcgttctctgcgcgggatcatgacgccgcgcggtgaaataagctgggttgacgctaatctcggggtcgatgaaatccgcgagcaactgctctcttcaccgcacagtctgttcccggtatgtcgcggtgaactggatgaaatcatcggtattgtacgtgctaaagaactgctggtggcgctggaagagggcgttgatgtggcggcgattgcttcggcgtctccggcgattatcgtcccggaaaccctcgatccgatcaacctgttgggcgtgctgcgtcgtgctcgcgggagctttgttatcgtgaccaacgagtttggtgtggtacaaggtctggtcacgccgctggatgtgctggaagccattgcgggtgaattcccggacgctgacgaaacgccggaaatcattactgatggtgacggctggctggtaaaaggcggtacagatttgcatgccttgcagcaggcgcttgatgttgagcaccttgccgatgacgatgatatcgcgacggtcgcgggcctcgtgatctcggcaaatggtcacattccccgtgtgggcgatgtgattgatgtagggccactgcatatcaccatcattgaagccaatgattatcgtgttgatctggttcgcattgttaaagagcaaccggcgcacgatgaagatgagtaagcattaacgtaacggcataatgggcgtgatatgtccattatgccgggcgggcggcggttggctgcccgccagccatttgggaaaatcacgtagcggcatcggctgtgcgtacaaatacccttgcaaaatatgcacgccatgacggcgcaaatacttcgcctgttcttgcgtttccacgccctccgccaccagttcaatattcagtctttgccccagcgcgatgatgatatcggtcaccgtcgagttaaccgcgtcagaacctatagctgcggtaaatgacttatcaattttcagcatgtcaggacgtaatgtttcaagccaggaaaatgaactgttgccggtgccgaagtcatcaatcgccagtttgacgtttttacgatgtagctcgcgggcaatccgataatcaacatccagtaaggcatcgcgttcggtgatttcgaggatcagttgctgaatcgggtgagcgctaaaccagtactgattgagatcttttatcagcacaccacggcgaaaatggctgggtgcgacgttaatgccaacatgaaactgactactcatcgggaaaacatggcgctgacgaatggtttctgccatcacatagcgggtcagtggcacaattaaatgatgttcttccgcgataggaataaacacatccggtgaaatccagccctgacgcggattgttccagcgcagcaaaatctctacaccaatacattgctggctgcgcgcattaagcaaaggctgacagaacaattcgaactcatgttgcgccaggcccagattgatttcgcgggaaaagctcatccggtaagcggtcgccagccaggcgatgtagcccaccagtaaacttagcagcaccgccagcggtaattgtgttggaagatagtgccatgccagcgccgtagcccccggaccattaacgttaatggtaaaaggaaagcgttgcgaagaaacctgatagttttcattgtcttcaggttgcggaagggaatctaccagcccattaccatagagcaaatgccgtttgtccaccgtcaggctggcgctactgatttgcggcagttgtggctcaaggagcattgccgtcagtaagtcgatgttaatcatctccatgaccccagcattgctactgcccgctgcaggcgtccattgaatcaaaaccggactgcctttaatcagggcacggtcgatcgtcaggcgtaaaagtggttgcggtgcaggaagttcagccagaatgtccacgacgggcacattgcgataaccaaaaatgctggagcaatagagtgttccgtcttgcaccaggccaatggatcgcacagtttggagttttgccgcctgtttacgtaatggcaaatgggcgacagagcagggcagaccaatcagcggaagcaagacttcgctacctgcctgtaggggaagcagtactttatctaattcctctacagcgtgattggcgaattgtactacccgttgttgatttaagttacgctgtgaaataaatcgcacgctcagggtcgaagcgagcgtaacgagtgcgcaaatcgtacaaacaatcattcgattacggcgataggttttaatgatccgttgtgctttttgcatgcgggccaccctgtaagcgtatggcgacaaacgcctgacgcaacagtggaagtgtagtggggaatattacagcagacgagaaagcgggtataaattcgcccatccgttgcagatgggcgagtaagaagtattagtcacactggactttgattgccagaccaccgcgtgaggtttcgcggtatttggcgttcatgtccttaccagtttcgtacatcgtttcgatgaccttatccagcgagacgcgcggtgcactggtgcggcgcagagccatccgtgcggcgttaatcgccttcacagaggcaatggcattacgctcaatgcacggcacctgaacctgccctgcaaccgggtcgcaggttaaaccaaggttgtgttccatgccaatttccgccgccacgcaaacctgttccgggctaccgcccagcagttctgcaagacccgcagcagccattgaacaggcaacacccacttcgccctggcaaccaacttccgcaccggaaatagaggcgttcattttatacaatgcaccaatcgcgcccgctgccataaagtaacgggtatagatgtccgggctgaccgattcaataaagtggtcatagtaagccagcactgccggaacgataccgcaggcaccgttggttggcgcagttaccacacgaccaccggcggcgttttcttcgttaactgccagcgcaaacatgtttacccagtcaatgacattcatcggatcgttagacagtttatcgctggaaactaacatccggcgcagggcagacgcacgacgtggcacgcgcagcgggcctggcagtacaccttcggtgttcatcccgcgatcgatacatgcctgcatggtttgccagacatgcgcgaaatactcgtcgatctctttcttgctgtgcagcgccagttcgttctgcatagcgagaccagacagcgaatagccggtttcattacagtacgcgagcagttcggtggcagatttgaacggatacggcacgctcacttcgttggcagcatcctgaccaaagtgttcttcatcgacgataaaaccgccgccgatggaataataagttttgctgtagacgacttcatcgccgttataggcgtggatttgcataccgttttcatgcagcggcaggttgccgttatgaaaacgcatcccgttgtcgcgcgggaaatccacttcatgccgtccctgtgccagcagcagacgttcgcgctcttctacgtcgcgaataaaaccgggaatactgtcgatatccacggtggcaggttcgttacctgcaagacccataataatggcgatatcggtgtggtggcctttacccgtcagcgacagtgaaccataaacgtccacggcaacgcgagtaacgctatccagtaagcctttttcgaccagatcatcgacgaactgtttacctgccttcataggccctacggtatgggaagatgagggaccaatccccaccttaaacatgtcgaatagactaatcacgataatactcctgacaaggtgactggacttccagtaacgaactaataacagcgcatagtgtaagagggaacgcggcgactggcttaactattcacatgaattaaactaatcaaaaaccgcgatttaactaatattgcgatgattgtctcaagtagtgttttgtagatgtaaagataagtatagtcagggtttcacaccaatttgcagcgccagctcacgaattatgcctgcggtcattccccatacaaaatactgttcgtaccaggacagccatacccgatgtgaatcgccacggcggtagatatctaaagggtgataacgacccagatgtaatgcctgggcgagcggcatttcaaacaccgccgagacttcatcttcactggcgcgatacggcagatcgggcgggataatgccgaccactggggttacctgatagccagttacgctatcgacgggcggcagcacgccgataacttcaacggcggaaggcggtatagcgacctcttcttcagcttcgcgcagcgcggcggcgataactgatgcgtccgtgtcatcgactgcacctccagggaatgccacttgtccagcgtgtttacgcagatgaattgaacgctgagtcagcaacaaccccggttgcggtcgacggacgatggggattaacacggcagcctgacgatgatttagggtttcccggttaatttgcgggcgcaaaagttgaaagcgcgataaaaaatcatcaagcatcaggctacggtattccacgtcttacttctccagttggcgtaatatcttattaactttatcaaaagtttcctgatattccgcttcttcctggctatcggcgacaattccaccgcccgcagagcagtatatttgtccgttaatggcagtcagagtgcggatagtaatgctggtatccatgttgccgcaaaagctcaaatagccaatgctgccgcaccaggcattacgtcgctgcggttccagttcgtcgataatttccatagcccgtactttcggagccccggttattgagccaccaggaaaagctgcgcgcagcagatcgctggcgtgtaactgttctggtagttgtgccgttatggtgctgaccagatgatgcacggcagggaagggttccaccacgaacagctctggtacttttaccgaacctgctacggcaacacgaccgatatcattacgcattaaatcgacaatcatcagattttcggcacgatctttcgctgagttcgccagtttttctgcttgtttgctatcttcctgaggatcgggcaggcgtggtagcgtgcctttaatagggcgggtctggatttcactattatcacaaagaataaaccgctctggcgaaaggcttaaaattgcaccctgttcaagacgtaaaaaagcgctaaatggcgcgcggttggcctgattaagctgaaggaatgcctgccattcatcgccagaataggtcgcatgaaaacgctgggcgagatttacctgatagcaatcaccgctgtgcagatattcctgtacctggcgaaatttttcgccgtactgctcgcgggtcatattggattgccagtcggaagtaagcgtgaaatcttcctgcggcgagaattgctggctttccagccaggcccgacgggcattgacatcattatgactcagcaaagaaactgtatgacgctggtggtcgacaatgagcgcccaatcgtagatacccactgccatatccggcagaacgatatcttgttccgcaatttctggcagtgactcaaaacggcggcccagatcgtagccaaacaaccccagtgcgccgccctgaaatggcaaatcttcgttatgcgttgggcgaatgtctgcgcgatccagcacctgctggagcacctgtagcgggtcatcagtggtcgttgtgcgtttttcgctttcactaacaacggtttctttacctaaagtggttaaagtgcaaatcggatcggcgaccacaatatcaaagcggctatacggatgatcggcatagccggagtgtaaaagcatcgcccacggcaggtggcttaagcgggagaaataaaattcagcggcgtcctgacgccagggtaaagtaatcacagcgggagataacgtcttcatcagtcctgactctactggctatgtgccgggtagcatgaaataattagcgccaacaatttagcaggagttaacaatgtttgcaggtttaccttcactcacccatgaacagcagcaaaaagctgtcgagcggatccaggaactgatggcacaagggatgagcagcggccaggcaatcgcgttggtggcagaagagctgcgtgccaaccattccggcgagcgaatcgtggcgcgttttgaggatgaagacgagtaacacactaatccgtattgatttcgttatacaagccgatgattatttgattgtgagaaaaaggacgctttttatatgtgattaaaagcgtcctgatccatttatgctgatgtaaattttactcagaccagtgcttttagttcttcctgcatatatgttgaaaagtattcaggatttttaatcacagagcgttcacctgactccattttttttgcccatccaaccattttttccgtaaacccagggttccagccttcctggtcagctcgcgccgtaatatcagcggcactcgcaggtactcccagttcttttaaatatttaaagattcccttcgccgtgctttcattcatcgaacttggtgttggcgctgatacatccatggcaccaatgaaatccagggctttatctattacagcaggcatattcttatccttaaaattaaccatgttatcgataaggctatatatgaccttaatttgggtaatgactccaacttattgatagtgttttatgttcagataatgcccgatgactttgtcatgcagctccaccgattttgagaacgacagcgacttccgtcccagccgtgccaggtgctgcctcagattcaggttatgccgctcaattcgctgcgtatatcgcttgctgattacgtgcagctttcccttcaggcgggattcatacagcggccagccatccgtcatccatatcaccacgtcaaagggtgacagcaggctcataagacgccccagcgtcgccatagtgcgttcaccgaatacgtgcgcaacaaccgtcttccggagactgtcatacgcgtaaaacagccagcgctggcgcgatttagccccgacatagccccactgttcgtccatttccgcgcagacgatgacgtcactgcccggctgtatgcgcgaggttaccgactgcggcctgagttttttaagtgacgtaaaatcgtgttgaggccaacgcccataatgcgtgcagttgcccggcatccaacgccattcatggccatatcaatgattttctggtgcgtaccgggttgagaagcggtgtaagtgaactgcagttgccatgttttacggcagtgagagcagagatagcgctgatgtccggcagtgcttttgccgttacgcaccaccccgtcagtagcagaacaggagggacagctgatagaaacagaagccactggagcacctcaaaaacaccatcatacactaaatcagtaagttggcagcatcaccttaatttgcatctaatatcaaagggattataacgatatggcacgagttaacctgttgacattcaggtgttttaaaggtagcagctcatggtgtgttatccagtaagaaggagaaaattaacggtcagtccgcacgctataaccagattgttcagctaagaaagaaaaccagagttgctaatcaaagggcgaacacaacggcatggttatgtttatttatatagttagttttatagataaaattgaaattataaatataaataatgaattagcagaagcatcaacagtaatatcttattctctggtcgatttatgtaaaaccgaccagtattatcgataaattatcgtctgacttattttgcttcgataaagcttacaccgcagccacaatcttaatttcaactttatacttcgggttcatcaaacccgcttgtaccgtgcagcgcactggcgcatgacccgcgacaacccaggcatcccacgctttattcatcgccgcgaagtcgtttttatcggccaggaaaatggtggcatccagaatgctcgatttattgctgccctgtttttccagcacggcgtcaatctgtgccagcgtgttggcggtttgctcaaaggcatcggcgtcgaggttttccggtacaccagtgtagtagagcgtgttgttgtggattactacatcagaccagcgggcttcagcatcgatacgaacgatagtcatcattttgtcctcattatacttccattttcgtgctgcaaagactgccacaatgtgaggttgccgtcaccacttcaactggcgaaagcgccctcatcctgacataatccctgttcaaatcaacagggggtagtgtgacggacgattttgcaccagacggtcagctggcgaaagcgataccaggctttaagccgcgagaaccacagcgacagatggcggtagccgtcacccaggcgatagaaaaaggccagccgctggtggtggaagcaggaaccggtacgggcaaaacctacgcttacctggctcctgcgctgcgggcgaaaaagaaagtcattatctcgaccggctcaaaagcgttgcaggatcagctctacagccgcgatttgccaacagtctcaaaggcattgaaatatacgggcaacgtggcgctgctgaaagggcgctcaaactacctctgcctcgaacgtctcgaacagcaggcgctggcggggggcgatctgccggtacaaatcttaagcgatgtgatcctgctgcgctcctggtctaatcaaacagtcgatggtgatatcagcacctgcgtcagcgtggcggaagattcacaggcgtggccgctggtcaccagcaccaacgacaactgtcttggcagcgactgcccgatgtataaagattgctttgtggtcaaagcacgtaaaaaagcgatggacgccgatgtggtggtggtaaaccatcatctctttctggcggatatggtggttaaagagagtggatttggcgagttgatccctgaagcggacgtcatgatcttcgacgaagcccaccagctaccggacattgccagccagtattttggtcagtcactctccagtcgacaactgctcgacctggcaaaagacatcaccatcgcctaccgcaccgaattaaaagacacccagcagttacaaaagtgcgctgatcgtcttgcccagagtgcacaggattttcgtctgcaactcggtgagccaggttatcgcggtaacctgcgtgagctgttagctaatccgcaaattcagcgggcatttttactgctcgatgacaccctggaactttgttatgacgtggcgaaactgtcactggggcgttccgccttgctggatgcggcatttgagcgcgccacgttgtatcgcacacggctgaagcggctaaaagagatcaatcagccgggctacagctactggtacgaatgcacttcgcgccattttactctggctctcacgccgctcagcgtggcggataaattcaaagagttaatggcgcaaaagcccggtagctggatcttcacctcagcaacgctgtcggtgaacgacgatctgcatcatttcacctcgcggcttgggatagaacaggcggagtcgttgctattgccaagcccgtttgattacagccgccaggcgttactctgtgtgccgcgcaacctgccgcaaaccaatcaaccgggttgtgcacggcaactggcggcaatgctgcgaccgatcatcgaagctaacaacggtcgttgttttatgctttgtacctcgcatgccatgatgcgcgatctggccgagcagttccgcgctaccatgacgcttcccgttttgttgcagggggaaaccagcaaagggcaactgttgcagcaatttgtcagcgccggtaacgcgcttcttgtggcaaccagtagtttctgggaaggggtggacgtgcgtggcgatacattgtcattggtaattatcgacaaattgccgtttacctcgccggatgatctactgttaaaagcgcgcatggaagattgtcgtttgcgcggtggcgacccgttcgatgaagtgcagctgccggatgcggtcattactctcaagcagggagtagggcgactgattcgcgacgccgacgatcgcggcgtgctggtaatttgtgacaatcggctggtgatgcgtccttacggcgcgacgtttctcgccagtctgccgcccgcgccacgcacccgtgacattgcccgtgcggttcgtttccttgcgataccatcctccaggtaatttgttacggagtatggtatgatgcgcgcctttttattgatctaagcacgaagacccatgcgaattctggctatcgataccgcgacagaggtctgctctgtcgctctgtggaacgacggtaatgtcaacgctcattttgagctttgccctcgtgaacatactcaacgaatcttaccgatggtgcaggatatcctgaccaccagcggaacttccctgactgacataaacgctctggcttacgggcgcggccccggtagctttactggcgtgcgcattggtattggtattgcgcaagggctggcgcttggcgcggagttaccgatgattggtgtctctacgctaatgacgatggcgcagggggcgtggcgcaaaaacggcgcaacccgcgtgctggcagccattgacgcgcgaatgggcgaagtttactgggccgaatatcagcgtgatgaaaacggtatctggcgcggtgaagaaaccgaagccgtactcaaacccgaactcgttcatgaacgaatgcaacagctttccggcgaatgggtaacggtagggacgggctggcaagcctggccggatctccgtaaagagagcgggctggttttgcgcgacggagaagttttactgccagcggcggaagatatgctgccgattgcgtgtcagatgtttgccgagggtaaaacggtggcggtggaacatgccgaaccggtttatttacgtaacaacgtcgcatggaagaaacttccgggcaaagaatgaatcttaagagtatgccctgagaaaaaaaggagtcgcatcatggcggttcaaaagaatgttatcaaaggcatactggcaggtacgtttgcgctaatgctgagcggttgtgtcactgtgccggacgccattaaaggcagcagtccaacaccacagcaagatctggtacgcgtgatgaatgcgccagatttatatgttggtcaggaggcgcgctttggcggcaaagtggttgtggtacaaaaccagcaagggaaaacccgcctggaaattgctaccgtaccgctggacagcggagcaagaccaaccttgggagaaccttcacgcgggcgcatttatgccgatgtgaacggttttcttgatccggtcgattttcgtggacaactggtgacggttgtcgggccaatcactggcacagtggatggcaaagtaaataatgcaccatataaatttatggttatgcaggtaacaggttacaaacgctggcatatcactcaacaggtgattatgccgccgcagccaattgatccatggttttatggtggacgcggctggccctatggttacggcggatggggttggtataatcctggccctgcaagagttgaaacaattgtaaccgagtaacaagttgtttttaaagaaaaagaaacagcggctggtccgctgtttctgcgttcatacggcaactataaaaataaatagtgacgcgcttcgcaaccttttcgttgtctaattatcaagctggtaagatgagttaatgttatgttaacaacatgtttatcacttggggttgcgatgacgacgaacacgcattttagaggtgaagaattgaagaaggtttggcttaaccgttatcccgcggatgttccgacggagatcaaccctgaccgttatcaatctctgatagatatgtttgagcagtcggtcgtccgctacgccgatcagcctgcgtttgtgaatatgggggaggtaatgaccttccgcaagctggaagaacgcagtcgcgcgtttgccgcttatttgcaacaagggttggggctgaagaaaggcgatcgcgttgcgttgatgatgcctaatttattgcaatatccggtggcgctgtttggcattttgcgtgccgggatgatcgtcgtaaacgttaacccgttgtataccccgcgtgagcttgagcatcagcttaacgatagcggcgcatcggcgattgttatcgtgtctaactttgctcacacactggaaaaagtggttgataaaaccgccgttcagcacgtaattctgacccgtatgggcgatcagctatctacggcaaaaggcacggtagtcaatttcgttgttaaatacatcaagcgtttggtgccgaaataccatctgccagatgccatttcatttcgtagcgcactgcataacggctaccggatgcagtacgtcaaacccgaactggtgccggaagatttagccttcctgcaatacaccggcggcaccacaggtgtggcgaaaggcgcgatgctgactcaccgcaatatgctggcgaacctggaacaggtcaacgccacctatgggccgttgctgcatccaggtaaagaactggtagtaacggcactgccgctgtatcacatttttgccctgaccattaactgcctgctgtttatcgaactgggtgggcagaacctgcttatcactaacccgcgcgatattccagggttggtaaaagagttagcgaaatatccgtttaccgctatcactggcgttaacaccttgttcaatgcgttgctgaacaataaagagttccagcagctggatttctccagtctgcatctttccgcaggcggtgggatgccagtgcagcaagtggtggcagagcgttgggtgaaactgacaggacagtatctgctggaaggctatggtcttaccgagtgtgcgccgctggtcagcgttaacccatatgatattgattatcatagtggtagcatcggtttgccggtgccgtcgacggaagccaaactggtggatgacgacgataatgaagtaccaccgggtcaaccgggtgagctttgtgtcaaaggaccgcaggtgatgctgggttactggcagcgtcccgatgctaccgatgagatcatcaaaaatggctggttacacaccggcgacatcgcggtgatggatgaagaagggttcctgcgcattgtcgatcgtaaaaaagacatgattctggtttccggttttaacgtctatcccaacgagattgaagatgtcgtcatgcagcatcctggcgtacaggaagtcgcggctgttggcgtaccttccggctccagtggtgaagcggtgaaaatcttcgtagtgaaaaaagatccatcgcttaccgaagagtcactggtgaccttttgctgccgtcagctcacgggctacaaagtaccgaagctggtggagtttcgtgatgagttaccgaaatctaacgtcggaaaaattttgcgacgagaattacgtgacgaagcgcgcggcaaagtggacaataaagcctgagcgttaagtcagtcgtcagacgccggttaatccggcgttttttttgacgcccactaaagagaatacaatttgaattaccaaatgattaccacggacgatgcgctggcttctttgtgtgaagccgtccgtgtctttccggcgatagcccaggatactgaatttgttcgtacgcgcacttattacccgcagctggggttgattcaacttttcgatggtgagcatctggcgctaattgatcctctcgggatcaccgactggtcaccgctgaaagcgatcctgcgcgatccgtccatcacaaaatttctccatgcaggcagtgaagatctggaagtgttcctcaatgtctttggcgaattaccacaacccctgattgacacgcaaatccttgctgccttctgcggacgcccgatgtcatggggtttcgcttccatggtggaagagtattccggcgttacgctggacaagagtgaatcgcgcaccgactggctggccagaccgctgaccgaacgtcagtgtgaatacgcagcggcggatgtctggtatctgttaccgatcaccgccaagcttatggtagaaacggaggcctccggctggctacctgcggcgctggatgaatgccgcctgatgcaaatgcgtcgtcaggaagtcgttgcgccggaagatgcctggcgtgatatcaccaatgcctggcaattacgcacacgccaactggcctgtctgcaactgttagccgactggcgactgcgcaaggctcgtgagcgtgatctggcggtgaactttgtcgtgcgtgaagagcatttgtggtcggtcgcgcgttatatgccgggaagtttaggcgaactggacagcctgggtttatccggtagcgaaatccgctttcacggtaaaacgctgctggcgctggtggaaaaagcgcagacattgccggaagaggccttaccgcagccgatgcttaacctgatggacatgccgggttatcgtaaagcgtttaaagcgattaagtcgctgattactgacgtgagcgaaacgcataagatcagcgccgaattgctggcatcgcgtcggcaaatcaaccaactgctgaactggcactggaaactgaaaccgcagaacaatttgccggagctgatttccggctggcgtggtgagctgatggcggaagcattacacaatttattgcaggaatatccgcagtaaaatcttccgaagccggactgggcgcgctcagcgccacatccggctttggcaaactacaaatccaacaccaggcgtttacccttcgcacgcgaacaacagatcaacatactttgctggctggcacgctcttcatcgctaaaatactgatcccgatggtcagcttcaccttccagtattgctgtttcgcaggttccgcataccccttcacgacataaacattccactttcgcggctttattattttcaataacctgcaaaatagtcatctcttccggcaccacaaactcttttccggaacgggcaagcaccagggtaaaggcatcgccggttttgtcttcgatagcaaattgctcaaagtgcagcgtatcggcggcgatgtccagacgcgcagcttcacttcttaccgcttcatttagcgcctcggggccacaggtataaacgtgtgtgccaggttcgatatccgccaataatcgcgctaattccagtcgtgttccggttgatgaatgatgcaaatggactttctcagcctgcggatgctggactagctcatcacgaaatgcgcaactttctggatttcgcgagcagtaatgtagctgccagtcgacgtcgctgtgttgcaactctgccatgtgcgacaggaaaggggtgatactaataccgcccgcgataaacagatgctttctggctgagggaattagcgcaaacgcccacttttacctgctgatgcaaaaagcgggaaccgccgcgcgagttttcctccagccgaacggcaatctgataacaagaggtgtcatgcggcgaactcagtagtgaatacgcattgctgtactggttatcaccatcgctcatctgcacaatgatgtgacttcctccggtgaacgcaggcagcggtttgccatcggttgccaccagcgtgaagcgtttcacctgttcggtaagcggttccacctgactcacctgtacttcaaacatttgatagtctgacattgctgtactccatcaaaaatcagcccagcggcggaaaataccgccgccgatgtcattagtccttaaacacctgcgccagcagattatggaaatgggcgataccatgttcggaaatgccactaccgctactgtcggccatgatgcgcccctgaccacgatagccacgcgatttcagccctttctgtacgctttcaaccagacgtaaatcttccggacggaacacatcgcgataccactcaatcagcgatttttgctcgtcggttaactcttcattggtgaagtaaatatcgtagttttgcagggtagtttcagaatccaccgggaattcataaatgaccgtcatcatccctttgatcggggtgacgttcagcatcgtgcacggccacagccagaaaccgtggaatgccgcatccgtaccctcttcaaatttaaacgactgttcggacggtttggcgaaaccgtattgcagcgtccagttaccgtgcatggtgtgccagtagcgatcaacctgtacggagtcggagaaacctggatgcgccggaccacagtgatagcactcgagatagttatcgacaatgttcttccagttggcaggcgtgcgggtggtaaagcgggccgccagtttcagatcgtggacttccgggcaggcttccagcactttcgcgcccagaccgggtaactgatcttctacgctggtggcgttggggtccatgttgatgaagacgaatccggcatattcttccagacgcaccggaaccagttgcgctttgtcgctatcgaaattggcgacgttttcgcagttacgtgcatgggccagattgccatcgagtttgaatgcccatgcgtgatatgggcaggtaatcacattttttgcttttccttcaccgctcaacaactgatgaccacggtgcggacacacgttatagaacgcgcgcaaaaccttatcacgaccgcgtaccagcacgatgctttcgccaatgatctcacgcgtcacataatcattggcattcgccagttcgctgctgtgagcgacgcaaatccagcttttggcgaagacgttctctttttcgtgttcaaacgcgttctgatcggtataaaaacgggcaggaatggtccacgcctcttgcgggttagcgcaaaaattttcgggtagtacaaagtcagggctcagattgctcatagggatacctttatcgttaggatgatggcgctcagttgtcgcctttgaatacggttcccgcagggagcactggtgttttttccagggcttcaaccggtgtctgcgggagataatgttcaacttgatgagccggaatgtcggcataatcctgtttcagccagcgaataaatccgccgactttcaccagtaaaatgacgaggaagggaagggctgtgagcacgacggtggttttcatcgtttccagcgaagcaccggtaaacaagatggaaagcgggatcagagtgatcaccacgcaccagaaaagacgcagcccacggtcaggatcgtcaccttcctggagattacgcgtactggtcgccgccatggtgtaggccactgcatccatatgcgaggcaaggaaaataatcatcacgcccaggtatgcggcgaggaacaatttaccggctggcaacgacatcagaacttgctgtacagctgtttcgccgcccagtgtttccagcacctgtgggacgttgattacgccattgataaactgatgaatggcatagctttccattacgccgaagaagaaccagcaaccgacggtgctgccgaggatcagtccccagataacttctttaatcttacgaccgcgggaaacgcgggtgacaaacattgctacgccaggggtgtatgagatccaccacagccagtagaaaacggtccagttgcgggtaaatgaaccatcgccaagcggatcggtgaataagctcatttgcaggaagttttgcgtggtcaggccgatggcattgatgatgctgttggtaataaattcggttggaccgacaatcagcaccagtaatggcagcaggaacgcgccccagccaaccattttgctcagacgttgcaaaccgttgttgataccaatccacgagcttaggcaaaaaatgccgccggaaagcaggatcacaaatgcctgcacggtgaagttatcgggtaaaccggtcagcgcggaaagtccacgagtaaaggttgctgcggtgacaacaagggaaatagtcagtgcgccgacagtggcgatcagaaacatcaaatcaaccagttttccccatgggccttgcgggcgaacgccggtaatcgcggcaataatgccggaaagactcagacctttgtttttacgcacatgaaagtgataagccatgattaatgaggccagcgtataagttgcccaggtgctgatgccccagtggaagaaggagtaagggacgctaaattcgagtgcctgttgtgaacgtggtgcgatatttaatccaggcgtttgataataataggcccattcagcaaccccccaataaagcgtagaagaacctaaaccggcacaaataaacataaacagccaggagagcgtgctgtattccggttttccttcgccaagacgaatattgccgtatttactggtggctaaataaatcaccagtcccattgccagcaaaaccaatacctgtacggcggaacctaacgtacgcgtaacaaaagtgtatattgtgttggccgcgtcggccgattgttgtgggaaaaggcttaatgcagctgcgatgaaaagaatggccaccaggctgatgcttatcagcggcacatcttttttcttaacattgctcatcatgagtcatctcctgggcataaaagcccgtctctggcttttgccagttgtaattatttgcagggtaatgagttgtatgttgtgtttaacaaattgattatttgcatgttacataaattaaacaattaagaatacggaaagccataaaacacgaaacggaaacaataaaaggtgaaatgacgcaggttattaactgcaaagaacgaataaaaaaaccgcgtcagtgacgcggttcaaataaactggtttgaccttaacgcaaaataattttgcaaatcgcgtcggcaacctgtggcgtggtggcactgcctttcatatccggtgttttcggcccgtgagcaatcacttcttcaatcgctgccagaataccgttatgcgcttgctggaaacgctcatcgccattgccgagaaaatcgagcatcatcgcaccggcccaaattgtggcgatagggttagcaatatttttcccgtagatatccggcgcggaaccgtggacaggctcgaagagcgacgggaaagtgcgttccggattcaggttggcggatggggcaatgccaatggtgccggtgcaggccgggccaagatcggaaaggatatcgccaaacaaattggacgccaccaccacatcgaagcgttccggctgcatcacaaaacgcgcgcagagaatatcaatatgctgcttgtcccagcggatctccgggtaattctcggccattgcttccactcgctcatcccagtacggcatgctgatggctaaaccgtttgatttagtggcagaagttagcgtcttacgtgggcggctttgcgcaagttcgaaggcataacgcaaaatgcgatcgacaccacgacgcgtaaataccgattcctgaatgacgacttcatgctctgtaccttcattcactctaccgccgagcgaggaatattcgccttcggtgttttccctgaccacgtaaaaatcgatgtcgccaggctgttttcccgccagcgggcagggaacgccaggaaagagacgaaccgggcgcaggttgacgtactggtcgaattcacgacgaaatttcagcagcgaaccccacaacgaaatatggtccggaacggtatccggccagccgacggcaccaaaatagatggcgtcgaaacggctaagttgctcatgccagtcgtccggcatcattttaccgtgatggctgtaatactcgcagctcgcccactccatttgctcaaaactcaagtcgaagccccagcgctcagcggcagcctgtaatacgcgaatcccttcaggaaggacttctttgccaatcccatctcccgggatcgcagcaatacgcatcgttttcatcattgggttctcacttcctgaccatcaaaattgacaacatcaccatcctataattgactgaaaaggaattaatccccgtaactggtgaaacataaaacacgaatcatgaataatttaccgctgctgaacgatttgcgcgtctttatgctggtggctcgccgggctggttttgccgccgtggcggaagaactgggcgtttcaccggcgttcgtcagcaagcgcatcgccttgctggagcaaacgctaaacgtggtgttgttacaccgcaccacccgccgcgtcaccattaccgaagaaggagagcggatttatgaatgggcgcagcggattttgcaggatgtcggtcagatgatggacgaactttctgacgtgcgtcaggtgccgcaggggatgctgcgtattatcagcagctttggttttggacgacaggtggtggctccggcgttatcagcgctggctaaggcgtatccgcaactggaattacgttttgatgtggaagaccggttggtcgatttggtcaatgaaggtgttgatctcgatattcgcattggcgatgacatcgcccctaatttaatcgcccgcaaactggcgactaattaccgcattctctgcgcgtcgccggaatttattgcgcaacatggcgcgccgaaacatttaaccgatctttccgcattgccgtgcctggtcattaaagagcgcgatcatccttttggtgtctggcaattacgcaataaagaaggccaccatgcgattaaagtcaccggcccactgtcgtctaatcatggagaaattgtccatcagtggtgtctcgatgggcaggggattgctctgcgctcctggtgggatgttagcgaaaacattgccagtggtcatttagtgcaagtgctaccggaatattaccagccagcgaacgtctgggccgtttatgtttcaaggctggcgacgtcagcgaaagtgcggataacgatagaatttttacgccagtattttgccgagcactacccgaatttttcactggagcatgcctgattaattattcaattatcgggttgatatcgggttaaaacctgattttctcctttctaagccgctacagattggttagcatattcacctttaatcgcgcatgatcgaaagataattaaagaggttaatgtgttcgctgaatacggggttctgaattactggacctatctggttggggccatttttattgtgttggtgccagggccaaataccctgtttgtactcaaaaatagcgtcagtagcggtatgaaaggcggttatcttgcggcctgcggtgtatttattggcgatgcagtattgatgtttctggcatgggctggagtggcgacattaattaagaccaccccgatattattcaacattgtacgttatcttggtgcgttttatttgctctatctggggagtaaaattctctacgcgaccctgaagggtaaaaataacgaggccaaatccgatgagccccaatacggggccatttttaaacgcgcgttaattttgagcctgactaatccgaaagccattttgttctatgtgtcgtttttcgtacagtttatcgatgttaatgccccacatacgggaatttcattctttattctggcgacgacgctggaactggtgagtttctgctatttgagcttcctgattatttctggtgcttttgtcacgcagtacatacgtaccaaaaagaaactggctaaagttggcaactcactgattggtttgatgttcgtgggtttcgccgcccgactggcgacgctgcaatcctgatacattcagcccgcgttgtcgcgggcttcccacttgtaatcctccctgatttttctctgatatggtgctaaaaagtaaccaataaatggtatttaaaatgcaaattatcaggcgtaccctgaaacggctggaataaaccgttttcagcgcattcaccgaaggagggaaaaggatgctgcaaatcccacagaattatattcatacgcgctcaacgcctttctggaataaacaaactgcgcctgccggaatattcgaacgtcatcttgataaaggaacgcgcccgggggtttacccacgcctttccgttatgcatggggcggtcaaatatctcggctacgctgatgaacacagtgcagagcctgatcaggtgatccttatcgaagcggggcagtttgaggtgttccctccagaaaagtggcacaacattgaagccatgactgacgatacttatttcaacattgacttcttcgtggctcctgaagtcctgatggaaggtgcgcaacaacggaaagtcattcataacgggaaatgaatcatgggcaaagcaacgtataccgtgaccgtcaccaataacagtaatggcgtttctgtcgattatgaaacagagacgccgatgactttgctggtgccagaagtggcggctgaagtgataaaagatctggtgaataccgtgcgttcttatgacacggaaaacgaacatgatgtttgtggttggtaattatcactgatcgttgatggcgcaatttctgcgccatcgcaaaaaaatcctccgtgatgctcgtcacaaatcttgccctcccgatgttgtgctatgctttttatcagcgactaacccgctaatgcaaaacagataagtgaggaaacaatgggcattctgtcatggattatttttgggcttattgccggtattctggcgaagtggatcatgccaggtaaagatggtggtggattctttatgactatcctgctggggatagtcggtgccgtagtcggcggatggatcagcacgctgtttggctttggtaaagtcgatggcttcaattttggcagcttcgtggttgccgttattggtgcgattgtcgtgctatttatctacaggaagattaaaagttaacgcttaaattgcacaaaggctgcacacaggcagcctttgctattttttagaggtgacgttaccaccatcccagctcagtgccgagtacgacaataatcgccacacccatcataataatcgttgtttttttcatctttatgcccccggggcagcatagccgccaataaaaaaccatgctaaaaatacgaccgctgtaataaagattacaaccggaaaaataataccgattcgcatgttatcaccaatcaaaaggatgtgaatacgcctcagcaatgtggcgctgaatgcgcgacaaaaggtgttttctgtttgtgttttttctcctgatacatcgcaatatcggcagcatgcagggcactgtctgcatcggttgtttcaggatcgacttctactatgccaagactggcaccgggataatacaaatcaacatcacctaagtgatattctccacgtatttgctgctgaatgcgttctcgcagcgacgaaatatccgcattctcgttgtttagtgaaacaaccaaaaactcatcaccgccgagacgaccaataacttcgccattttgctggagcgtattaaggcgctcgccaacctgaatgagaaacagatcgccactattatgaccaaaacgatcattgattaatttgaagttatccagatcgataaacgcgatcattatcttatggttaagatgccgggcgagagaaaacagcgtcgtcagattttcaaaaatcgcccgcggattcggcaacccggttaacgagtcggtatacgattgcgcaatcagcgcagcattggcttcgcgcaactgttcaaccagtgcctctttttgaatatattgtgcaatcagtccggcgaataactgtaaaacctgttccgcgcgttcactccactggcgcttctcactgctggcggcgcaaagcgtgccatagaatgatccatccggtaagtgaattggtgtgctcagaaatgtggagatgccaagattgcgtgccgcaatacagtcgccccaacggtcagggacttcatcgctgaaaaagcagttttcatcaatggcgcgtttgcataacgagtaatcccacgagacggtaaaattctccgggatgtgcattttctggctgttacgggcaaacataatatgctgcaggcgcgcttcgacatccactttggtcaggtaggttgattccatatcagtgaccatttccagcatctccagaagctgtcggaccagactttccagtgactgttctttggcaagggattgcgagacgcgggcgataatctgatctgacacgaaacaactccaggatacggcgggtaaatgctgattatttaatctttgcaggcatgataaaacatcaccaacaaagatgaaacaagacgtaatatgttttgagtgaatgtaataaaaatagtgctgcaaaacaaaacgataccgcgatactctaagcgtagataaatgagtgagatcaataaatgaaaattatcagttttgctttgccttgcttgctggtcctggctggttgttcaacctcttctcagccagaagtacctaaaccgccgcagattggtatggcaaatccggcgtcggtctattgccagcagaagggcgggacgctcattccagtgtcgacagcgcaaggggtcagcaacaattgcaaattaccgggcggtgaaacgattgatgaatgggcattgtggcgacgggaccatccggctggtgaaaaataaccgccggatgctgtactaaaatcacaagctacgtagccagtcggccagcaccagcgcatggttctgcgtggtgttttttgctgcgtagagcagggtcagcggctgttttttggcgatgtccgccagccgctttccttcttgctcgtgttgcgccagttctgcaagatattgctcgcgaaaggttgcaaaatcgacgacttcgccgtgaaaggctttgcgcagttccgttgacggcgtgatttctttatcccactcatcaagggctaaatcggtttttttgataccgcgcggccagaggcggtcgaccagtacgcgataaccatcgctctgttcagccggatcataaacgcgtttgcactgaatattcatcgtgtttgttctccctttcacgcatgatttgtcacgtcactatagcaccggatattagcgaatttctttgtctctcccggcgcaaagtccgaaaatcgccatcagtagtgaaagtattgcaacacccatcagtggtacggaccagtcaccgttagcatcgtgtattttacccattagcggcggcccacaggctgccagcaaatacccgacggattgtgccatccccgagagtgccgccgcctgatgcgcagaacttgcccgaagaccaatgaacgtcaaccccagtatcattgttgcgccggaaccaaaaccgaaaagcagagtccaggtgatcgcgtgcgctggcataaagcagagcccaacagcgcccactgcgcacatcaaggcaacgaacgctgcaataccacgctgatctttcacatgatgtaagaaaagagggatcagcaaaccgggagctgctgtggctagttgcagcaaaccatgcagtgaacccgcctgtgcttcgctatagccgtgactgatgaggatcgccggaagccagccaataatcacgtaatagatcagtgagttgatcccaagaaacaatgttacctgccaggcaagcggcgaacgccagataccccgagtatgtaaggcgcgcgaggtactcaaatttgcatgttgttggcttcgccactgtggcagccataaaaaaagagccagcagaggaaaacacatcagcatgagcaacgcgccttgccagccaaaaccgttcaaagccagcggcactatcatagccgatcccagtgccgctgcagctcccattgtcagggaatatgcgccggtaagtctggcgacggaatgagggaaatcgcgtttaattaatcctggcagtaagacattgcctaatgcaatcccaccgccaatgaccgctgtaccgccaaataataagtaaggcgaagggagagagcgaattgcgataccagcacagatcaaaagtaacgcggcaaacaggctacgttccataccaaaacgtcgcgctaccggggtggccaaaggtgagattagcgcaaaggccaataatggcagggtggtcaataagccggtttgcgctgtcgtcagcgagtaagcggaacgaatcgtatccagtaacggtgctgcgccgataaaggtgacgcgtaatgttgtggcaatcatcagaatgccagcgataaggacaatcctgtttttgccgcttaatgaagttgaacaggtcatatgcttctcattgttacaaacgaggctgtaccttaccgtttttattgttatgttgaatcaagctaaaatgacaaattatcgctaaattcggacaaaatgatgcacaggttgaatctcaatggctatgaacccgaccgacaccatgaagccgcggtcgcattttgtattcacgccggaacggatgagttaaccagtcctgtacatcagcaccgcaaaggacagctgatactagcattacatggtgcaattacctgtacggtggaaaatgctttgtggatggtgccgccgcaatatgcggtttggataccgggcggggtggaacatagcaatcaagtgacagctaacgctgaactctgttttctgtttatcgaacccagcgcagtgacaatgccgacaacatgttgcacattgaaaatatcgcccttatgccgggaattgattttaaccctggcaaacaggacgacgactcagcgtgctgagccgatgacccgcagattaattcaggtcctgtttgatgaactccctcagcagccacaacaacagctgcacctgcccgtttcttctcatcctaaaatccgcacgatggtggagatgatggcgaaagggcccgtcgagtgggggtcattagggcaatgggctggcttttttgcgatgagtgaacgcaatcttgcgcgactgatagtaaaagagacggggttgagttttcgccagtggcgtcagcagttacagctgattatggcacttcagggattagtgaaaggcgatactgtacagaaagttgctcatacgctggggtatgattcaacaacggcctttattactatgtttaagaaaggcctggggcaaacgccaggccgatatattgcgggattaactactgtttccccacaatcagcgaaaccagacccgcggcaataagcgggccgaccggtacgccgcgaaacagcgccacgcctaaaacagtgcctaccagcagcccggcgaccagttgcggctggctgcccattaaggtcacgccgcgcccacccagccaggagacaatcacgcctactgcaattgccaccagcgatttccagttcagaaacgagtgaatcaaggttgagggcggtagcgtcccgctggcgatgggggccataacgccaatcgtcagaatgattatcccgatacttagcccctgtttttcaatccacgggaaaaaggtgcttaacggtgtgacgcggacaatgatcaacaccagaattgaaacggcgacagtggtgttatgactgataaagcccagcgcagctaacccgagcaggatcagcaaagtgacatcaaacatcgtggtttccttgccaaaaaataataagcctgcttactttacgtttgctgcaggaaggaagtagaaaatctttacgttttttgcataaaaaatcaggcgaattgtcatcaaactgccatttgtgcacgctaacaataacgtgaaaacagctatctcccgggggcatgctatgaacgatcaaatgttcgtcgagacactgattatcacgtcatcgttttttgccattgctgttgtgctggttttgtccgttctgcttattgaacggacaggctagttacgcagtgcggcggaaattgagcagttctggttgcgcaatgcgcaaataatccgtggttttcaaaataacggatttatccagcatccctgcattgaaggcgatttcatcaaatcgttcgaagagtagagggtcggcaaccagtttgagttttggatggaagctgaaaggggggatcgcgccgaagacacagcctgtgagttcatcgacttcagcagggctggctaacgaagcgcgtaatccgcctatatggctggcaagttggctcagatcggcctgttgatcggcagcgaggatcgccagaacatgttgatttacgccattgcctttgactttacataccagtgccttagctccctggcctaaagcggtgccacgaatttctgacaccgcttcacatttacctaccgcttcatgggtaacgacgcggaagttagcaccttcttgtgataataaagcgattaaccgctgatgcgtcacgcttcctttagccatttcagtcatttcacgctcctgagattacaagcaaacaaccacagaaggttatcatgaacggctgtttttgttctgcttattgacatataaacgctcatcggaagctttatacgcatcatgtaacgtatcgttttctttcatcgcgtaaataccggaagagaagccgatttctttctgcggcgcgatatgttgcagacgtttttcgatacgttcaggcagttgtgctgcaatttgcggcgtcgaatcgacaagaatgatgcagaattcatcgccaccgagtcggatggcataatcacttttacgaatcgattgtttaatcgcctgagctaataacgtaatcgctaaatccccctcctgatgaccgagggtgtcatttatttgctttaacttgtccatgtcaattgcaataaacatcaccgaagaaccggattgcaccagtttctgcaaccgctgctccagttcaggggttaaaattttgcgattatacagtccagtcatcgcatcactaatattttctcgcgacacattttggtataaacggaagtgcattcggaccatattcagcaaaattaacgccgtcaaaatccagaacagaacgcttttccacgaagacgtgataaagtaaagaatatcaatggataacgagacacgaatgccgcccggtaagtcatggacgtaactgacatactggaacagattatcttcgctctggttgatgataatgtcgcgccccgaatcggtatcggttagcgtgacattgagaaaacgccagaggagagggcggtcatgagtgtaaaagatattccgcaaattgtttttgttaatatccagcagcacaatcccttttagctgccctgcgacatataccggcgtcagcaaactcatcacgttctgtttagtacgctgatcctggtaaatgctcgacaatacggtacgcccggtaaataccttttcaatatctttgcgatcgatgccaatacttcctgactgcaggaaggaccagttattcatcgcaaagtattcaacattaaccggctcataaaaatagacatagcggtcattgagatcgagataatagtgaaatttctcttcggccatcccaagacctgaaccgtaatcatcctggtggcggttgccttccactgcctgatcaaaagcgggtaatagtgctgcagcttccacaattgtgtcgcagtcagtggatgcggtttgtagtgtgccgcgtaagcccgggtatttatgggcagtcaggtttaagccatgggtattattggcagactcaaaagcctcgcagatggcgcgccgctgttctggcgacacttccgactgctcagcagcgagagcgcgcatcacatgcgcggcaatactctgattctgatacttatcataaagaaaggaggagtctgctttctgcacgatatagcgcagataggcactcattgctctgtcgctggcgacaagttcaaaaataaggaaggaagatgtcagcacaatgacacttgcggcgataaaatgccgggtaatgactccaacttattgatagtgttttatgttcagataatgcccgatgactttgtcatgcagctccaccgattttgagaacgacagcgacttccgtcccagccgtgccaggtgctgcctcaaattcaggttatgccgctcaattcgctgcgtatatcgcttgctgattacgtgcagctttcccttcaggcgggattcatacagcggccagccatccgtcatccatatcaccacgtcaaagggtgacagcaggctcataagacgccccagcgtcgccatagtgcgttcaccgaatacgtgcgcaacaaccgtcttccggagactgtcatacgcgtaaaacagccagcgctggcgcgatttagccccgacatagccccactgttcgtccatttccgcgcagacgatgacgtcactgcccggctgtatgcgcgaggttaccgactgcggcctgagttttttaagtgacgtaaaatcgtgttgaggccaacgcccataatgcgtgcagttgcccggcatccaacgccattcatggccatatcaatgattttctggtgcgtaccgggttgagaagcggtgtaagtgaactgcagttgccatgttttacggcagtgagagcagagatagcgctgatgtccggcagtgcttttgccgttacgcaccaccccgtcagtagctgaacaggagggacagctgatagaaacagaagccactggagcacctcaaaaacaccatcatacactaaatcagtaagttggcagcatcaccaaatgccggagcattctatggtgcaatttcatgataaatggcactccttcggttagtgaaacgagaaaaccagataaagttcgattgcggcctggcacaggggcgctaattatactcatctctgcgccgctggggaggggaaatttaggggtaatagtaataaattgtatgcaaaagccacgcaaaaagcatggctctgaatatttttgcacttaaatatgatgaataatcactttgttgcccccctcgcttttcgcttcgcgtaaggctttatctgcttccgtcatgacaagcgagatattacgcgtgtcacccgttgaaaaaaccgtgccaatactgatggtcatttgttcaggaacatcatatctgttactaaagccggtcaggagttcgacatttttacgcatacgttccgcaatgatttttgcctgggcactattgagttcggtaaatagcaagccaaacacctcaccctccagtcgcgctaaaatatcatcggggcggatgctttgctggataatatcgacaattgaaaccagcactttatcacccacacgatgtccccattgggcattgatgcgtttgaactgattaatatcaaccagcatgacacagaagtccttaacaacaggtctcgacaataatgactctacgctgttgaaaaagtagcgccgattataaatattggtcagcacatcatgaactgccagtttgctggagagttgcagtttctgaaaaatgttataaatcagaaaagacacaacaaacagtttactggaaacttcaatcccgcgactgatataccagatggtgtaattatactcatccagagtcagtagaagtaagttgcagcatagcgatgccagacataataatgctattaacggccatagttcgctggctaatcgtgtacgcatgataataaagaacagtaaaaatgcccacagacaaaccaatatttttgtatagttgattccccaggtcgcagtatggttgtccggacagtagtcgacgacatacaaagaatagtcagcgttataactgctcagattgtgtgccagaaggggaaaaactaaaaaaggaatcagcgccagcaacaggattcccgtttttttcttattgttgtcaaggatgttgtcttttccataacaaaagagtgccagcgaggttaaacaaataaaactgagttggcggaaaatatagaaaatagaaacatcattcgactttgtctggatcagtgtactgccgttaattggtttatggataattacaatggtttcaactaaatagataaggccacttaaaaatgcaaggcttaaaatgagtgttggtaaaatttgtttgttagtgaaatatttcattaacatgaaaagaaaaatgacggcgttaaggaaaaacaaagccacaacaaccatcaggtaattcatctgtgggatgagttttacatttgtgttttcgttatataaggtagtaatgcaaaataaaattaacgtcagcaataaactgaaaataaaaaagctttgagcttttaatttttgtgtacccatagaaaccataaaaaggagagcaatgtgagtgctggattttattgatggcagagatatatagttttgaccaggatcaattttcgttaacgataaaaaatatttaaagaataaccccatggaaatacgtgttgactgaatcatttttccgaatgattgttttctggaactaaattatgtaaaggttatgctgtcatatttaaagcgattgtaagctaatgtatgtaataaatgagataatttacagtaagctaaaaatcagccaggcgataatgacctggctgatagttttagtctttagctgttgcattttgtttatgaaacagttcacggaacaccggataaatatcatcctggtcgcggatgtgctgcatcgcaaagttgtcgaaagtagattgcagatgctcatattctcgccacaatgtctgatgtgcacgacgggtaatttcgatatagctgtaataacgaacaacaggtaataattttttcgccaggatttcatggcaaagcggagagtcatcggcccagttatcgccgtccgatgcttgtgcagcgtaaatattccactgtgccgggttataacgctctttcactacctcatccatcagtttcagggcgctggaaacaatggtgccgcctgtttcctgcgagtagaaaaactcatgttcatcgacttctttcgcctgggtatgatggcggatgtatacgacttccacgttcttatacgttctgctgaggaacagatacagcagaatataaaaacgcttagccatatctttagtggattgatccattgaaccggaaacgtccatcaggcaaaacatcactgcctggctggagggatcgggctgcttctcgtagttcttgtaacgtaaatcgaaggtgtcaataaaagggacgcgttcaattttggcacgtaattctgcaatttctttgcgcagacgttcctcttccagcagttgcgcaggttcactgttgctgatgatggccaaattctcttccagcgcatgaagttcccgtcgcttgcccgccgtcatggctgtgcgtcgcgccagtgagttctgcaaggaacgcacaacgctgatattggctggaacgccgttagcggtataacccgcccgatgcgttttatattcggtcagctggcgttgttggttttgtttcagattcggtaaggccaaatcttcaaagagcagatcaagatactcatctttcgaaatctgaaagacaaattcatcctgaccttcaccatcctggctggcctggccctgaccactgccggaacctccgccgccaccctggggacgttcaattcggtcgttctggacgaaatggtcattgcccggatgtacgcggtggcgcaggccgccacgcccctgatgaaacatcggttcgctaatatcttccgtgggaatggatacggattcgccgctgtcgacgtcagtcaccgaacgcttattaatggcctcggagatcgactgtttaatttgcgctttataacggcgtaaaaaacgctggcgattcaccatgcttttgtttttgccgttcagacgccggtcaataaacccggtcatatgccccccgtactacatttgccaactgtatgctacgcctgtgttgccatttctctggcccacggttcgctgtcgttataggcccggtagcatgtgtaccgggccagggttgttaagacgatttacgtacgcgcaaataccattcgcacagtaaacgcacctgtttacgggtgtagcctttttccatcatacggtcgacaaagtcgtcgtgtttcttctgctcgtcggttgacgttttggcgttaaacgagataaccggcaacagctcctcggtattggagaacattttcttctcgataaccgtgcgcagtttttcatagctggtccagttcggattgcgtccgctgttattcgctctggcgcgcagtacgaagttaacaatctcgttgcggaaatcttttggattactgatccccgccggtttctcgattttctccagctcggcgttaagagactcgcggtcaaacagctgcccggtatccggatcgcgatactcctgatcctgaatccagaaatccgcgtaggtaacataacggtcgaaaatgttttgcccatattcggaataggattcaaggtaggccgtctggatctctttgccgataaactcggcatatttcgggatcagataacctttcaggaactccagatagcgttctgcctgctcttgcgggaactgctcgcgctcgatctgctgttctaggacgtagaacagatggaccgggtttgccgccacttctacatgatcgaagttgaacacgcgggagaggatcttaaacgcaaaacgcgtcgacagacctttcatcccttcatcgacaccggcgtagtcacgatattcctgatacgacttggctttgggatcggtgtctttcagactttcgccatcataaacccgcatctttgaataaatgctggagttttctggctctttcaggcgcgaaagaatggaaaaacgtgacagtgtttccagcgtgccaggggcgcatggggcgtgagtcaattcactgtgattaagcaatttctcgtagattttgatctcttcggaaatgcgtaagcaatacggcaccttcacgatgtaaacacggtcgaggaaggcttcgttgtttttgttattacggaaagtgacccattcggattcgttcgagtgggcgagaataatcccgttgaacggcagggcggagataccttccgtcccgttgtagttaccttcctgagtagcggttaacagcggatgcagcactttaatcggtgctttaaacatctcgacaaattccatgatcccctgattggcgcggcacagcgcaccggaatagccgtaggcgtccgggtcattctgcgcgtagtgttcgagtttacgaatatcgactttccctaccagcgcggagatgtcctggttgttctcatcaccgggttctgttttggcgatagcaatttgttgcagaattgacggccagaccttcactacccggaacttagtgatatcgccaccaaattcatgcaggcgttttgccgcccacggcgacatgatggtgccgagatagcggcgaggaatgccatactctttttccagaatctgcgcatcttcctgcggattgaaaagacagaacggatgatcgttgaccgggctacgctcaccgttggcgctcaatacataaatcggtacgagctgcattaatgatttcagtcgctcagcaagcgatgatttacccccacccacaggccccagcagatacaggatttgtttcttctcttccagcccctgagccgcgtgtttcagataagagacaatctgttcaatcgcgtcttccatgccgtaaaactcttcaaatgccggataacgtgcaatgacccggttagaaaagagtcgagaaagtctgggttcctgggctgtatcgaccatgacaggctcaccgatagccatcaatagccgctcagccgcgttggcataagcactgcgatcttgccgacaagtggtaagaaactcctgcagtgtgaactcttcgtccttggcagcttcatatcgctggcgatagtgatcgaatatattcatggtatgccgtccttttgtatactctgggaacatttgtgaatcagcacttttagcgtaattcttcaacgggataaaaaatatgctccgtcctatttgttatgagcgagtatcaagcattcagcaagttgatatgggtaaaggtttggacgaccaacgatcatcattgactgcatacttagataaaaatgctgataagttcactgacgaaaggattttcattactgatgcggggctttccgcattcaaaaatgccaatatctctccagagtctcagcttgggatatttttgcaagatgtgggcaaccgcaagtacggcgtaggtgacgcacttgtggttttatcgctggatcgtctatcgcgtcgatcaagctgggccgaaagtactatccagtacatcgtgaatagtgggattgagattcacgatatctctacaaaccttgtgttacgggttgatgatcctatgtcaaaaattcacatggaactgatacagcaccgttcacacaatgagtcattgatgaaatcggtacgtgcaaaattggcatgggataacaaaatcacacgtgcagtacagaacggggaagtaatctccaaccgtatgcctaattggttgagaaatgtagataacaagtaccaagttataccggaacaggcagaactgattgttaaatgtttcatgtggtatagggaagggttgagtactggcgagattgttaaacgtatcggtagaaagtggcagatggtcactgtgtccaggctgatacgtgatcgccgtttgttgggcgagcatgaacgttacaacggtgaggtagtaccaaacgtttacccgaaaatcatcgacgaagagttgttcctgacagcgaatagaatgatggatcgcgttatgttggagaagaagaagccagcagaggatctattacttgaaccagaagttgtccgagagatttttaaactttatgagacaggccttggttcaggggcgattgtaaaacgcttgccgaaagggtggagtaccgtcaatgtactgagggtactacgtgataagaaagtagttaccatgaagattatcgataacctcacctttgaacgggctaatgagaagttatcgcggaatggtatagctaatcgtatccgtaaggacattaccattgctcaggatgattacattactaacctcttcccgaagatgctgaaatgcggtcactgtgggggcaatattgcaattcactataatcatgtacgaactaagtatgttatttgtcgtaacagggaagaaaagaagatctgcgatgctaaatctatccagtacatgagaattgaaaagaacattctacagcttgtcaaaaatgtagacttcaataaattgatgatggaaggtaagtcggattcagattcattgcttgcatcattgcgagaagagttaagtactttacagaaagaggcagaaacctatcaggttaaaattaatgaacgtaaggcagcaggtaagaaagcctcgttaccattaatgacgggtttaactgaggtacaggatagaattgaagaaatagaacctgagatattaaattcaaagaacatcaaagaaatccctgtatttgatttcgatattaataaagtacttgatccattgaatgtcgagttacgtgcaaagttacggaaagaagtaagattagtactgaaatctgttaagtactgggtttttgaaaagcgtatatttgtacagttggaatacttcaatgatgtcctatcccatacgcttgtgattgataacaagcggggcgggggtgaagtactacatgagatcgtaatctctgaaacaagcggcgagcgtgtctacactgtcaatgaagagggcaaaaccgttttcattgcctccgttacatctggtactgatatgtggtcgcttgccattagccgtaccaaaatacttgatgatgttggattgtatcttaatcttctcaagcgtgaaaaatttgagatcattgttaatgaagatatgattgattggatggattaaaagctaatgagaatttatggtcttgtagaatgaattatgcgagttaatatttgaacaatatatctacgatgtcgaaatctaacggcattgtagatagagcaataaaagagggattatgaattttggatataactacgcacccgatgggtttaagatttccgtgcaaaatacagcaaatcatttatatcagcgtgtgttagaatagtcaagggtaaaattaacttttttgacttttcaacgttaaaccagtaccatagcgtcattcactaacgaataggagcgatgaaaccatgagatgaattctaaagagaggattgccaaaatgcgtaagaaagaaaataaagcaaaaaaagaaaaattccgtcaatttttccctgagaattatgatattgggatctcattgaatgaagagaatcaattaaggcttttttcaaagcggaatgattctcaagatgagagcttatgcaagtacgaattttccaacaaaattaaagttcagtacatttttttgccgtattcttctgaaattcaagttataacagatgagtttccgctaacggaggcaggctgtcaggagtgtactcaagctttcaaacatccaatatcaatggaactaattgaagagataaaagaagcaaaatgttcagttactggacttgtcatttattcgaaacctatactaaaacttattagctaacacatccaaattgttacgttttaagtactccctcactaaatactataaagttgaatgtgaatgggggtacttcaaaatggaatggtttactaaattactttacgagatagtaggctttgtactttacatctttctgataatcccaatatatatagtgctcatgtttttatctatgattttagtactattgctttccccattaaaaatcaaatcgataaataaatacgtagtaagaaaaatgaaacgctaaaagttttggtgctatactaatagtatcagaacgataatgcgttttgccttccgctccagctttgaacataaataatatagcgacaataaatttcctttttaattaagattgcctctcttgcgagagaggtatctttttaatttggatttataaatacagtatacaaatacacctataaggatatagaaatgaaaaaagtaactttaaaggaacgcaaacatcatgtagtaaccgcacgtcttaatgacgatcaagtacttgtacttaaccagctaattagtagtgggaaggtacagaaagattcattatcagcctgtgttcagtacttaattaatcagtacatgattttacagggcggtggtaatgaagaatgactttgatttagtacaatattttgatgattacacaatagtaggggatatggattatcactatttctattgtgtgaagtatcaggaaggttcattagaagcacattatgaacgaattggtgatccagaagtattaggtactattacatggaatggaaattacctaatcgacggattaccaatggtaatgtttgtactggctgctgaagatgaacataaggaatgtttaaaccgtttgctaatcgtatgtgagaaggcgagggatgaatataggctaaatgctactggcctctaagtagtagcagacgcgatcacatggagtgacgcgataacaacaaggacgtttgatatgaaccctaaaatcacttggagattaattccaaattcaaaacattactacgtatctgaaaatggcgatgtttacaatgataaaacaaaacagtatatagctacgaaaaacccatctaatggatacaaaaaagtttctattaatggcaaatcactatatgtacatgttttggtttgtactttattcaatggtgctaaacccattggaggaagatacactgtagatcatatcgaccgcgataaaatgaataacaaagcaaaaaatttacgttgggtaactcagaaggttaataattccaatagaaagcataaaggtactcgtactcaaaagcttactctaaagcaatggttaatgattgttggagagtaccttaaaggacaattatctcaatatgcaatcactaaatggtttttaaatcaaactggtattaatatttgccctcagaatataggtaagttattcaaaggtactacctattcaaaatggtacacaacatatcttacgaataagcaaagacaaagaatacaaagcctaaccattcaacgtaaaccataaaaaatgccagtattccagtactggcatctattcaaaactcaatggcaatgaagccaaacttattaaatggcctgtaatcactacgggtcacgattaattaatttatacaggattatttatcatggcaaaaacctattcaacttttgataacagaaacataaaagcactaattagccagtacaagctatataaagatatcccatgcgaagacatcaagaacatcatgaaggactcagtagctaaacttaaagtgagagataagattagtgtatatgatgtgtttgcagtattgagtaatgaagatgaattacggaatgatttactattcaatactatcaatgctattaaagtacaacagaataagaaacaagtaaaagaacgtatgatcaggtactatggggcagcgatcacggatgcagcaaaacgaatagagcagtatatgttggcacacccaaacgcactgccagcaccagtatatggacaaagaacactaacatataaagagtttggtaaactattggaactacaaaaacaaggtgactttattgatgacatgatcgagtacttaaagggcttgcgttaattgtaacttattacggcatattacggcatggatgtatgccgtaatacggcaaaaaaagcccctgaaacccgctatttaccatcaatacggcaactaagtatagagatacgaaatccattccatttcattccatgtatttctttctctatcagtattccaagaaactgtgacttgcgtcacgaatactactcgtcgtgaactcctcgtagtattggttagtaacgttgcgtttttctcgccagtactcgaaaacccgcaaggcgttactactcgctttgctcgatagatgttagtacagcaaatgaagtacctaaagtgaattggtaagtacgacatgccccgccagttccacaactctcgctctggtcatttccactactatgatgctattggatagctacataaagtactggatcaagtaggcattttttgtgtacaaagagggaattaagagagggataccatgaacagaaaacaattcatccagtcgcatggtgctacttgtagtaactggacttggagttggtcatttgtgaaccacgacaagaaaatggttatctttggtgcatgggatgtacaaaaagagcaagaaagatcagtcattctgagggagcggtggaaaaccaaagttgtggagggaaaggaaagaaaaaatcttggatatattcaagctattgaacacattcaattgatagctgaaggttatgagctttacacgtttgatatggagcagggacgaaacgatgagaatagagatgtagctgttatcaaacggttcactccaaaacttgaaaaacgttaccttcggaaagaaggaacagtttggtatgcagactttttacctaatccatttccagatgaaattacctcacctgaaaactacgctgagggtgcaaaaaagcaagttacagtaaactcctacgagcgtgatccaaaagcacgacaggcttgtattgaccatcatggtacttcctgcgggtgttgtgagtttaactttgagaaagtctatggtgaacacgccaagggctttatacacgttcatcatatcaaaccgctacacacagtaggcgaggattacgaggtaaatccaattactgatatggttccactttgtccaaactgtcacgcaatggtacatcgcggtaacgaagtattaagtgtcgaaagtttaaaagcactgttgtttaaagacagcaataaaatttgaatttattttagacttgatacgacatacttgaaaagttatgaatacaatatgctttaaattagacatgtaagttgagagaaaaatgagcataacaacaatagcagctacatataaagatgtgttaactattgctttttcggcgttgtcatttattattgcatgtacttccttatacttctccggtagggcagcatggcatgatagatcaaggctaaaaataacagctgacctcgtctacgagtcttttgatgaggaaccttataaaatcgaggtgatagtgatcaatgttggtaggcgtgatgcagttttggaagggatgctttgccattatgaaaaaggcattaggagccattcatctccaaaagagagcattgttattaaagaaaagcaaagaaaaaaatttgaattggtaagctcagacttagtcacgatagataatgaatgtgatatttgtcatttagaagatataactattttagatgtggaggggaatgaacataaaatccctaactctcacagactcattgcattacttaagcaagataaaaagacttaagaataatattttttggaatgtaaggtaaatgttagatgccactatagattgagggttagaactactaacccactatagggtttacgagatgataagaatggaatttaacacctacgatggtgatatatattacttcctctatttatataggaggtacgaaagggggagtactttaatgaagaccttataaatcttaatgttgagatgttagttatagcggtgaggataccccaccgtctattgggagttgtggactctaattagagaaaacgaataagttattcatgtcctttttcaaggttgcatgtgcttctattaaactatcaaatgtatctactaataactttccatagctgacattgtaatgatatctatcatgaatgtcatttatatcaaaacttatcgcttccctcaatgttcctaaagcaatttgattactgaagaaataattattgaatatagcttcatcttttggcgatactttccaaaaggtaagtgattgcaattcgctttttaatgaggctaacttaatgtttaatagatcgataacttctcgttcagttttaactaaatgtgcgaaattttttggttctatatctggttcagtattgttaaggttgcatatattttcatatgttttcaacatctccaacgaaaaaagatcgcaattagtccagaacttagtaacttgatttaaagcattttcctttattttagtttgaaaccaatttttagcgttccatgctgcatatagggctgctccagccataatgagattggcaatagaactaacccagtcactaaccgatccccactcgaaaccttcagaaccaacaaagagtgattttattagtactaaaattacaacaaccagtaatactgctacggtcgataaaagaacgatatttaattttctacaatccatcgaaagtagttcctgaacgcattaaaggggcaaatactttaccatccgaaacacaatcaagtacactacccgttcacgtactgctcacatgttgggtttgttattttgttggggtgagcagtacgtgtatcctcagaagggtagttccccctgatcacagaaccaatcaccttcttcactgctttgattcatccggtactcagcagatagatatgctaacccatcaataacacttattagtggtgtttcacaggtaagtacaaaacaatctctctctatagtacctaaccagtattccctgtactgattctggaagaataccctatccccataatgaaattctgttagtgcagatccccaataacacacggttgcccagcgaccgttatgtgagaacttctgaacccctcgcgtaatggatggatcatagccgtctttgctcatttgttaccctcctctatgtattactgtatatatgtacagtattgcagtcagtttcccaaaaatccagcacccctttgtttaccactttgaatgattaattctattgtaatgatcaataaaattgatcgatttaattgccaatgttttaaaaatgatcaattatcaataacttaaagcgtaacgagcaaagttatgaacattgataattgggcaataccgataacaagtttgggtggtcagttgctgggggttgagttggtcagccatgtagaacgcgagggaatcaggcagatcggcctatgggaagaagaagtacttcatgggcaactaatgcttattgaaagcaaggcggcatggttcagggataacggtttgtattgtgtgattactactggccgtggtgaaccatacgagtacttaccattccttcggcagatgtgtcaacgccacgatgtttgaccgttatttgccattttcatgcccgctaaatactttcgttactgatgctgtccgctttccaccatttcatcatcactgattggcgttgtgtttttggtcagcactccagctttacgtttctcttttaaccggtaactctctcctttgatattcagcgtggttgagtgatgtagcagccgatccaggatcgctgttgccagtacgtgatctccgaacatttctccccagtctgcgaaccctttgtttgacgtcagtatgatgctcgctttttcatatcgacggttcagtagccggaagaacagactggcttcctctctgttcatcggcagatagcctatttcatccaggatcaacacccgggcataactcagttgctgtagctgacgctccagccggttttcctgtttcgctttcatcagtgtcgcgatcagtctgtccagtggcataaacagtacccgatgtcccgcatccaccgctttcacgccaagagctatggccagatgagtttttccgacaccaggagggcccagcaggatcacgttttcgctgcgctccacgaacgccagaccagccagttcccggacaaccttacggtcgatgcccggctggaaggtaaagtcgaactgctccagcgttttgacccacggcagacgagcctgcttcagcctggactccataccgcgctgatgcctgccgttccattcctgctgtagcgccatgcacaggaactcccggtagttcagctcttttttagctgcctgttccagcaggctttcaacgtgataactcagatgctccattttcaggcgactcagcaggacttccagttcatgcatcacaacagctcctcataggcactcagtggtcgatgttccacctgactgacctgctgccagagcggggcgtgatgctccggcactgtctgccagccagacgatgctgaacagaggcgatgtgaggccaccagtttctcattactgtagatccgcaactcgtcatccagcgatattcgtatcgataccggctgaccacacagcgcttcgggaacgctgtaacgattaccaccaacctcgatatagctgtcccaggacacatggcggatatcgaagtaactggtatcgaagtctgtatccggtaacggctgcagatgttcctgctccagcgcgaagcgctgttccggcgtttctttgaactggcgaagctcccgtttgtcagccacatcggctatccattgctccagttgttgattgacatgagtgaagctgtcgaacctgcggtaccggacgaagaagttctccttgaggtatttcaccatccgctcaaccttaccttttgttctggccctgcgtggacggcatgcccgtggcaggaagttatagtggtcagccagcaacaggaatccggagttgaacacgactttcccgttgttattcttcagcaccgcagccttctggttatcaaccagcaccgttttcacacaaccaccgaagtagcggaaggcgcgaaccagtgattcgtaggtatgctcagcatcctgttttggtgcggcgaagacatggaagctgcgggagaaccccagcgtattaaccgcaaagttaactttgcaccgttgcccggcaacctccacctcaacttcgccccagtcatgctggagctggtatccaggctgagtttcgaagcgaactgttctttttgacggacgcattttacgtttgggctggatgtagtaacgcagcatggaacgtccgcccgtataacccattgccttaatctccgcgaagataacctcgctattccagacattctctgccaggcgcatgtcgatgtaatccataaacggtttcagcttaaccattttgtggcgggtctttctggctggcggttcagggtatttgaggtagcgtctgaccgtccgttcagagcaaccaatctgagtcgcaatatcaacgatgtacgcgccctgctggcgcatttgctttatcatgtaaaagtcctctctgctcagcatgttgatgtcctttctggtgtgagaaccttaaggaaacaacatgttgggtggagcggacaatccaaatggcgaattaccgtcttatatcactggcgctgacagatgacaagggatatgaaagtacataaccagcagtggcttgatgatctcggtgtacatggtggttctgctattcctctggttacaggtgatttcgaggttgcccgattaaatagaaggtacacagaagagaacattgaccgtctgatctttccagtactcataaaaagcattcgccagtactgcgagaaggtgatcgtacccgtcagagataaaacgtattacccaattctcagagaggccggtgtatgggcggtacagggagagttcaggccaatgcgttttgagcaatgtgaaaaattaataggataacaataatgaaaaaattactaattgggttactgattgcccttagtactggatgtactactacgcacagcttcatggataaagcttacgttggctatgtagatgacaaggccgtagtactgtttgatgcaggaacacgtaatggggtgaagtactaccgtcctcagttccagagtgattgcggtcgcatctataacaagatctatcatgatgacaatacaagtactggatgcctcatacgagattcccgcattgctgaactacatccctatagagagcatgtaagtaaggtagtaccacatcagaccgatagtgttcacgattggttagaaggggtcaattcaccatcccatatcctcgacaatctatagggtacgtatgggaaaggtaatggtgattttgttagtactggctggggtactcttcaacattgcaggtgaggatgcaccccagccacagtacacggacaatgagaaccagaacgctatggatttcgcacagtcactaatcaagggtaagtacccatgcgatatggtgactatggatagtactgagaatggtacaggacgtattgatgtacggtgtgatggtaagtaccagtatgagatcatccggcatgatggacaatggcaggtagtatcgaagtaatccgaaaagtttagtgcttaggctgtatggtgagaatctacagggctttttctttatgcggtgataagatcggagtgaactttttatgaaggaatagttagtagaatgaaaattacagtcgataatatctctgaaatgtttgcaggaactaaagaactactaatcggtggcttaataacaggtatcgtcggagtacttattttaactcgtgttagtggttatgaatacgttaaagtacctttaatgttagtaatgatattcttactaactgtagttcctggttttattgctatgcttttttcaccactaacgaaagtatttgcaaagatatttgatattaaaagcagtaatatactttgccgcattttctcatttctatatttcatcttgtatatggctattactttcttggtgactaattttatattcactaccgcaatgtcattacacggcggggatggtgggttgagagcatgttttgcaattggctgttttgtcgttgcagttgagcagacaagaaaattctatagtttgcttatcaagtaaagggcaagtactaaagaaatgtgtatttgatgaagggtaagtactttcatcaaatacgcaacaaattacaaggtgagcatttcatcacaattgttttaattaacgatattttaaattattttacgtaattgaaacaaaatcagccatatcgcttgttaattggtattgagactttgtaggtgttatcatgcaattaaatcatttgcattggtatctcttatggaaaaattgatattgctattattattacctttaacaacaagtgcagctattccagactttaaatgctgggatattcataacgattcatttagtactgacatgagtttctacgttacaagatatctcggtaaaatgccgccgccttatggtgcatttcattatgaaacagcacctgatgagaaattttacagggaactggtaataaccaatgaagcatttgatgatggatataattacggttcgagatatctaaacaaagaaggaactttgtacgatgatattaaatgtaagcggctttgatactcatgattcattgtatatagcttacaaagtatattaaccattgcattcaatgggtccctccatactggcggtactatcgagggttttcggcagcgggtttaatcaattgtgtgtgaacaaaatgatcatacccgcaccgcatttaaaaaagtaccacaccaatttcattaaattcacattggcaattatatcttactggacactcgcataatttaaacacggcgtaagagcctttaagttcttcagttacgtacttttccataaactcgatatcatctggttcacaaaaaagatgaaatccgacaccaagataattacgcattttgtagttacactgtcttatagcactaattttatttttgtcagcatttaagcccctaactaatggtactacacctttagtacatttaaactcaataaaaatataatcatcagagggtgtggatttttcacgcagtatcaaatctactttagcaagtttactatcaggataatctattggatcgaggtatatcgtaacttcacgatgtagctcgtacttcctttttgaagttagataatgagcaaattctatttgcagccacttttcccaatcattagtttcttttttcacgaaagaatatagtcttttttttatctcatctttcttcaaaaatccgttcagcaattttactaacagagaaaaatcattgttacggtctgacattgtaaaccctataaataaaataaaaaggaacaaatatggatatctcattaaggtcattagcgagacagtacggatacgatgaatctacagttcgaacttgggtagaaaagggaatgccgacagacactgattcaaacgcaagaagttggattgtagataatgtactaaagccgttgcgtgatactaatacaaaagaacaaattgaacaagagcgtttgaagaagctttcagcagaacggcagttagcagaattagaattagcagaaaagaatgggctggtggtcagtactgaatatatagaacaggtactaacggaatatctattccaggtcaaaacagcagtgcgtgcaataccatcaaaaacttatcttgaattatttgcacaatcagatgcaaaggatttacgcgatgtattaagaacgcatattgataaaacattataccaattaggctcaatggaatttgagttacccgatgacatggaagtaatagaggatggaaacaaacaagaagaaattaacgaggatactgaagaaagtactaccgacgatacaaccgccgaagatacagaaaacgagtgagtggattagtaatggtgtagttaaatttgtggacgggccgaatatgggccttgattgggttccgtttagtttccaaaaagaaccaatggatatagctcaagagcgaagtactaaaaagattgtacttcaatcttgttcccagcttttgaaaactacagtactacaatcaattgcatttaacctaatggctaatgatccctgtaactttgcttttggtagtagttctgaatcagaagtgaagaaattcaaggatggtaaatttcttccagctattgaaaccagttcagtactaaagccgttagtaaccgataagaatgtggatttgcccctatatttccagacatctgttatcacttaacccattacaagcccgctgccgcagatattcccgtggcgagcgataacccagcgcactatgcggatgccattcgttataatgctcgaacgcctctgcaaggttctttgctgccgttaacccgtctggtttgggcatgatactgatgtagtcacgctttatcgttttcacgaagctctctgctattccgttactctccggactccgcaccgccgtgttcttcggttcaagtcccaacatccgggcgaactggcgtgtttcattagcccggtagcatgaaccattatccgtcagccactccactggagacgacggaagatcgttgccgaagcggcgttccaccgctcccagcatgacgtcctgtactgtttcactgttgaagccgccggtagtcaccgcccagtgcagtgcctcacgatcacagcagtccagcgcgaacgtgacacgcagtctctctccgttatcacagcagaactcgaacccgtcagagcaccatcgctgattgctttctttcacggccactctgcctgtatgtgcccgtttcgatggcggtacagcaggttttcgctcaagcaacagcgcattctggcgcatgatccggtaaacacgtttggcattgatcgcaggcataccatcaagttctgcctgtctgcgaagcagcgcccatacccgacgataaccatacgtgggcagctctccgataacatggtgtatacggagaagcacatccgtatcatcagtgtgacgactgcggcggccatccatccagtcatcggttcgtctgagaatgacgtgcaactgcgcacgcgacacccggagacaacggctgactaagcttactccccatccccgggcaataagggcgcgtgcgctatccacttttttgcccgtccatattcaacggcttctttgaggagttcattttccatcgttttcttgccgagcaggcgctggagttctttaatctgcttcatggcggcagcaagttcagaggcaggaacaacctgttctccggcggcgacagcagtaagacttccttcctggtattgcttacgccagagaaataactggctggctgctacaccatgttgccgggcaacgagggagaccgtcatccccggttcaaagctctgctgaacaattgcgatcttttcctgtgtggtacgccgtctgcgtttctccggccctaagacatcaatcatctgtactccaatgactagtctaaaaactagtattaagactatcacttatttaagtgatactggttgtctggagattcagggggccagtctagaatgataagaacgccgccaataactctaaacaaacacaaatggtgaacggtacttttatctattggttgaacctcaacacgccggggaaccttcgcggtatcacaacacgctgtgttctgttagatgaggtcagtagctgcgaaatcactgatgaagggaacccaatcaaactggcagaagcacgtaccagtaccttcggtagtgactcactggtggttgtatcttccacgccattgtataaagacgatttaatcaatgctgagtacaacctcagtgataaacgtaggtactttgttactcacacatgcggtcatgaatatacttttgaatgggaacaagtagcgtttgaatttaagcaattagaaaatggtagatccattcctgatagtactactactcgtttgttatgccctcattgcaatgagggaatagatgaacatacacggcatcagatggttgataatggtcgatggattgcaactaatccagatggggaaccgggtgtagtagggtatcaaatcagtagaatgtattcacctctgaatactattactgaaatggtttcaaagtttgctgatgctctatataacttcaatcttcaaaccttttacaataacgaattgggcttgccattcgaagatgagtatcaaaaagaattagatattctccaattagaatccctacgagaagatgaatttaacctttataaaattcctgaaagtaccttagcgttgtgtatttcagttgatcagcagggtgataggctggaaagtctgcttttaggttttgatgaaaagaacatttatgtacttgggcatgagtttttctactcccacgattgtacgaagattgaagccccagcttggaaggatttagatcagttttgccgtcaggatttcagtactgtatcaggtcgcatagtacctacactggctgtgttcattgatgcagggaacggtaacgctacggatactgtgaaaaaattcactacacgttggagtaagtatcatccgatcaagggtagcagctccactactggtgaactattcaagaccagtactcaggcggggtacaaactacagatcctaaacgtacatgaacagaagaacacgatacgccgcctcctgaacctgatgctatccagtgaggcagataacgccccggttaagctccgcttcagtagtaccttaccatcagatttctttgagcaactttcagcagaggagttaaaacccgctggtggtaagttggtatggcgattaaagaaaggtcaaagaagaaatgaggctttagacctaatctgttatggaatgatcgccatagcatatgcccaatcaaaattaggtactcaaccattcaggaagttacgcgattataaagcacaggaaaccactaaatacgagataaataaagtagaagaaccaaaaccagaaacagtacaaaaaccaaaacggaatagacgtactggaatgggatcaaactggttcggtaaaagataaggatatcaaaaatgacacttctaccagaaaagatctacatggtatcgaatcccatggatctaacggtattagtacccgctgctactattcttgttattagttttacatcatctggaaaaagtacctcattagataatttaaatggtagtacttcaaaagaatttacggttgtattagatatgagtacagcacaggaattactattctgtactcaaatatctaatggtcaaaccagtacttttacttctgaagtcattaatccattactttatacttctgagtactcccaattaaaacagatgatcagtgaaattgatcaggttatagctaataaaattgcaggcggtgctaattactcaataacaattaataataagactcttgtaagtgaatcattatcatcgcttgaatcaatgcgggaacgctatgtaaaacgtgctaatgctctatttgtgaaaatgaatggcggtactttctctaatggcggtaaaccaatcaagagtattacggttttcaggcctaagccagggagtacacgctaatgttctggaataagaaaaataaaaattcagaaactaaacccaagaagattaaacaggaacgttccttaaaacaaagtaccttaaaacgagatctacaggcagtacgcaacacatcagtaatgaacttcggattcaattcaaactcaggcagcaatatcaacttccttctgatgaaagcactacctaccttcagggctttctcacgtgatgcagtacttaagaatcctattggtcgtaagtacatgaacctatcggtagatggcgttgtaggctctgatggcctgtacgttaaaccttcagtagagattgacggtactgaagaagaaatcaacggaatcaatctaaccttggaaaagctctttgaccgttgggcatatgatgctgatcgttttagtgttgatggctcattaagttttgacctgtttcagcagaacgcagagaaggtaagggtccaggatggtgaatgctttattcgtatacacaatattaataataccatcaagttagaaattctcgatacggttcgtttgcttcagttaaataatcaacgtttgagtaatggtaattatattagtaatggtattgaatttgataaatggcataagccagttaattactatttctgtaaattcgatcctgttacctatacttatatcactggcgattatgaagtaattcccgctgcggaaatctgtcactactttattgctgatcaacaaggccaggaacgcggattgccggacatggttgcaacttccaaattaatggaagatctcaagaacttcactgaggctgcgttaactgcgaaacgtgtatctgcatcgtcaatggcttttattaccaataataacgacactaccagtactgatctgttaggggctgatgaacgagaagaagttacaccagtatatacagagtattttgaagctggctttattggtgagttagccgaagggcaggatattaaaactgttacacctactaatggtgttgatgggattgatcaatttaccaatgaattgatgaatcagatctcgatgggtctgaacataacaaagcaagccttattatctgatacatccaatgcttcatttagtgcaagccgacttactgagaaattacaacaaactacattccgtacccgtactaatgtactaatcagtaaagtacttaaaccaatttatatcgcctggttaaagaacgaaatgctaaataacaataagttaaatctaagtttctcgagctttgatgatcttatttgtgctcggtatatttctcaaaagccaattagtttagatcctgtaaaggatatacaggctgaactactccagttagaagcaggtattaaatctaaaacacaggttattgctgagttaggcggtgatccagtgaaggtattagcagaggtacaggcagaaaaggataaagaaaataaaaacaaggaagtaatccaggatggaaatgaaaaaccagaagagggaactaacgaaacccctacaggcgattaatacagaatcgcgtaccatcgaagtagcgttttgttcagaaacccctgtagaacgtgaaatcaacggtcaaatctataacgaaattcttctatgtggttccagtaacgcagacctaacccgccttaataacaatggggcagtactctttaaccataaccgtgatgatcttattggtgctgtagttgatgcacgagtggatgctgatcgcgttggtagagctacattacgaattagcagtaccgccaacgatgaatgggaaatgattcaggaaggcgtactaacccatattagcattggctataacattaatgattatcaaattgatggtaataatatctatgttaccaactacgaaatttatgaaatctcattagtaacagtacctgccgatcctaccgttggggtaggtcgttcaatggactcacaacttgcattgaaatcactaaataaagaaggtgaaacaattcaagagggtcaaatggatatggataatccagaaaacgaaaaggaatcaattgttgatagtactgaagaagtaaatgaaacaattgaagaggcattagtagagccatcggtcgaatatgcagaagaaatcaaacaagaattaagtgatgaagaacttttagaaattatctctactcgacctgatttgctcaataaagtacatggtgaagaaccagaaagtataaatagtacagaagatactgaacgtgttcgtgaattagaagcactcggtaaagtacttaatattgatgtatctgaagcaattgaaacaggaatttcaatttcagatttcaaacgtcaattgaatgacattaaacaaaatcctcttcatgataaggaaatcaaagaaatggataataaaaatctattaaaagatatggtacgtgccattaaaactggcgataaatctgctcttgaagcatatgaacgtggtattaatggttttgtacgtgcggctgtaccaagtactaatactactaccgctgctggcgttgtagctgatgacctacaagatcaatacattccagaactactaaaaatttctgcacttggtgaactaaacaccactgtttattctggccttgcaggtcgcggtactctaagtattccaaaagcggctggtgtatctccggtatttaaattctatggtgaagcagaagcacaggatgattctattgcaagctttactaaagtaaccctaagccctaaagcttttggtggtgctattccactatccaaacaagcaattctaacggctccaaatattgaatcatttgtacaaagtgaactactacggtatgccgctcagggtcttgagcaaaatgtaatggataaagtagttgccgctgctccggtgttcaatgttgaaactgctggttctattactcttgaagatgttcagggtgcagtagcgaagctggcacaggctaacgttgatatgcgtggcgttaaagctgttatgaacgctaaaaccctaagtaccctacgtcagattgcagtacttgataacactgctgctaaagcaatggttgaaggttatcgcagtactgaaatgtggcttgctgatgaagtacgtgtagtgatttctgaattcgtagcagatggtactattctaatgggcgatttctccaatgtaattctcgctaattgggaagggcaggaagtagattatgacgatacatcctatcgttcaagtaacactatcgtatatcgcgtatgggattactcagatatcgcacttgcacactctgaagctttcgtaaatatcgttattggtaaagcagaataataaggattagataatgagagtatttaaagatacgcagtgtgatgcgtttctaaatgctttcggtcagtctatccaaacttgtacgggaagtacttttacaggaatagtagaagtacttcccgtttctattgaggcggcaggtggatttatcgaaagcgtggaaacatacctaacaatcagaaaggacgatctaataaccgcaaacgtggcaattggtacagtactaatcattgatggtgtaaaccagacaatctataacattgaagatgatctatcaggtatggttaattgctatttccgtacttctgctggtgcttcatttgcagaggactactaatatgatgttagtacaaaaagtacggaatacgatgaagcagcttatcaatgctactaagaatctgacagtatcacgtgatgttgatgtatttgaacaaattgcttttgattactcattaacgagtttaagtttcagcaatgaacgccgggcaggtaactttgcaattcagtatctgatttcccctaaaccagaatcaggtaatacagccccatccatcacttatgatcagattattagtacttttgataaagagaaaacttcagcattcagtgatgcaggtttaataatgctttcgtgttcttatgaacaatccgatattgtcacagatcctataactggctcggtttccctatcctttacgataaatattcaagttacggaaaagacaagataactaaaaggatataaaggatgagtgatattttctcaggaagagaattatcagtacagtataatgctgatattggtaacagaacaccacagggagcaggcaatgtagtaattaaacagattaatacttttccaaccttaacaataaattcagaagcaaataattttgaaacgtatgatagtgattacaggacagtactactatctgataaatcagtagcaccatttgatattgtagttaactacctacctgatgatcctacacatcaattcttggataatgccgctaagtctcagcagcttttccagatcatcattcagtaccagatgaataaggatgaaaataccattacttatgcgatggtgaatggttatatcacctcttataagttggacggtgataaaggttcagtagtaaccaaggcatacagttttgccccacatgatgtgatcgcacgtgcaatgaccattaacgcactatcgccaatctatcagggggactacggtttaggttcgaacactacggatgtacctcagtactcaccatcagtacctacgggtaacagcttcatcaaagtaccatcatctcaagcaggcaatcctgccggggcggatctgatgggagtagggcttgtagatggcactactgtaagttctcttgcgatgacaaagacgggtactctaagtatctatgcaaagaacgctacaaccgcctggacacgcatatataccgctacacagatggacgggcgatacgtaccccttacacgtaccatcaacggccatgcactcacggccaatttagtactgaacagtgaagatacaggttcagtacctgatacacgtactgtgaatggtaagcctctaagtgaggatgtagtacttaccagtactgataccggctctgtaccagatacacggacagttaatggtcatgtactcagtgaagatatagtactgagtagtgaagatacaggttcagtacctgacacgcgtacagtgaacggtcatgtacttagtgaaaatgtagtactgagtagtgaagatacaggttcagtacctgatacacgtatggtcaacggtcatgtactcagtgaggatgtagtacttaccagtactgatgttggcttagggaaggttacagatgatgcccagcttacgatagcaggtaatctaagtgatctgggggacgtggaagaagcacgtattaaccttgctgtttactcaatggatgaagtagatgcagaggtaacggctttagctgacagtattacttcccttgattccgcttccatgaagaaagcgagtaacctttctgatctatccagtctctctacagcacgtactaacctacaggtgaaccgtttgactcagggtgctacgtacaccgatctgatgagtaatgacctgactaaccgtatccgaattcaggataacggggcatggggtgcaagtactggtactggatggattgctttaggtataggtcagggggggacaggggctacagatgctttgagtgctcgcctaaactttcaggtggatcgctttaatcaaggtagtaatttaacaactattaaatccgctgattcttccgctgcattagtggtttatgatggagggcaatggggttcagctacatatattgcgggtgctttcactggctggaaagcattagcaattccgcagggcggtactggtgttaagactcaggctgagttatggcctgcgattcgtcctacgggtgcaacttctttagcaggagatcctgtctctgattctgacgcgactaccaaacgctgggttgaaaacttgctgagtagtcgtacttcagttagtcctcaatgggatgttattgcttcttccccttcctctacggcaattggtagttatgtaactggagggcgtattcgttcgatatgcaacattggtacatcaactgaaatatctggtggttttcgggttggtaaaacgatgggacagactggacaggctgatctcaccctttttatttctgaaaatggtgcagaggataaactatgggggctaaaagggccgactggaacgatcctaactgatgttcaatcaggatggatgactaataccgctgtttcgggaccgacagatgccaataccatcacctttaacggtatgtatgcagggccaggtgactcaggtattaactatagtgaaaaatattcccctttattgcacatgcaaagatacccaggggcaaatcgctctcagcttcagatagacggtggtggtactttaagagtacgaggcgggaacggtacaacatggtttggatggttagtaatgcaagctcaaggtacatcaggtcgtgagtttaaaagagacataactccagcaaatccagttgaagcattagatcggataatgtcacaagatttagtaacgtttatctacaaggatgatgaacaagaaagggttaggtttggtgttatcgccgaagatgctgagttgactgctccgcagtacattaagcatgatgaagaaacagttgaaatagaaggggagattgtcactcgtgatcatccacgtgttgatttaaatccaatagtgatggacttgatgggagctattcaagcccaacaagaagaaattaatcagctaaaagatttagtacaacagctattaaataataaataaatataaacggggtgaacggattcactccaataaaattttcttataaggatataaaactatggctatggatattttttccggtgctaaccttactgtagaagtaggttcaagtgctggtaaaacagttgctactgactttgtagaagtaccagaggtaaacaccttcagtacttcaggctttgaaagtactgtaattagcgtaaaaacattcaataatgcttatgatcgtaagctattgggtactaagtcaatcccggacatttctcttgcagttaactacttaccagataatgcagtacatcagaatttagaacaacttgcagacgatcagaaacgttgtcaggtaaaactaagctattttaccgatgcaactaaaaaagaaggtttctttgtaatttatacctgctttgtttcaagtaccactatcggtggtgataaagatgaagtagtaactaagactttcacccttgcagttgatggtgaagcaattgattcaggtctgattactccaaaaccagaatcgggcgaataataataaataaagggaaggtgctcaactttcccttttttattggagatgaaaatgaatttaaacgaattgaagaaaaaactacaaccagaattaaaaccacatgaagtaatgggtgaaatcatctttattcatcgtccaaatggtcaggatttccagaaatgcactgatgtggctaaaactctaatcctatgtgtaaaagatgaaaatggtgatcctatcttcgcagaagaagatattgatggacgaattaatgttaactctattgattttgtaatccagaatgaaatttactcagcaattattgctttaatcaatactgcgaaacctgtagatgaagtagaaaaaaagtaagaggtgatatcgaattaaagtacttttgtaagatggttaacaaaagaggcttatcacctgaagaatactttagtttagatcctgatgtactcaatatgcttatgatctacgatacttttatagaaccatccggtacgcagattgaaatgatgaaacatgcgtaccagtgttactacaccactatcagtaatggcaacctaacaccagaagcaaggaaaagtatcaaggtacaggattttgattttcttgatgtgcttagtgatagtactaagagtacttcagagaaagctgaagaaagaaaattaaaaactaaagaggctcaatccaatgatattaaatctataggggagttaattaaatctcaggtattaggaaagaaaaagaatggcaaataataatagaatacgtgtagatattacgggtgattcttccggtttacagcgtgctttaaggtctggtactgaatcattagaggaatttggtagtactgctggtggcattgttgaagagttcacaggccgaataactggtatggctggcgggttcggtactgctatgaccgggatcgcgggtgctgcggctattggtattggtggcctggcagcattagtagaatcatcacgtgaatatgtgcgtgaaatgaaccagatcagtaagagtaccggattgtccgtggttcagttacaacagctatcagcggcgtttagtggcctcggtcttgagattgataagtttggtgatttcaacaaggataccttggataagctcggtgatgcttttcgtgctggcggtggtgtatccgatgatcttaaagaatatggactcaacctacaggactataacaagtacttaaaacaggctgatggtggtatgcaggctgtgatccacaccttttacgccatgcgtgatgcaggtaaatcacagagtgaaatagttaacgtaatggaaacgttagccagtgactcaagccacatgattagtactcttcagcagttcaataatgaggctcaagctacagcctatatccagtcacaaaatgctgaagtaactaatgatgctgctgaaaaatatgctgaattcgataaaaaccttgggaaacttactaccagcattaaaggtactattgctgatggcctatcacctttagttaatgccatgaacagtgtctatgatgctgcaaatcaaaaacctcacgaggcaggtttgtttgaagatctgaatgaacgtattaaaacttccaagggttctctacaggatatgttggatatctgggaaaaattacgtacagcaggggcattaaactaccagggtgcagcactcaatactggcatcatggatgataagggcaacaagggtaatgagttcgctcaggctaaggcacgtttagaagaactggcaaacaacctaaagtccgatgttgcggttgctaccgctcctactggcggatgggttgatcaggcaaaagaagctgaagatgcagcgaagaagttagaacaacaacgtaaacaggcagaagcggcacaaaaggcggcagatgcaaaacgcctacaggctcaacgtaatctggaagctgctcttgctcaagttggggaagatggttttcaggtacgtctacagcagttcgacagacaacaaaaggcacttcttaaaaccatcaccgatagtgctcaagtactcggtatcaatcctgatgaaatgctaaagaacgctactgcatatggtgctaaacaacgtactgatttactgaattcaatggttggttatcaagatcctaatcagggtctgaaagataccaatgctcttattggttccggtctactcaatgacaatcagaaggggtatctggcacagcaacagaatcagcgtatcaatggtggtaatccattagcctataacgataccgatcagaagttgaaagataacgctgatgctatgaatgctgaacttcagcagaatgagttgttgctgaaaggccatgaggactatgagaaacgtaaagctgagatcacggcaaagtacaatgcacaggccatccaaatcagtaaccagaatgcacaggatcagttaagtatcttctcaagtactgcacagtcactatcacagggcatggttgatgcgtttggggaaagtagtggggctgcacaagctgcatttaccctaagtaagagcataagcattgcacagacagtactttcaattcagtcagcattggcccaagcactcgctaccccttggccagcttcattggcaaactatgcacaagtactttcacttggtatgtcgattattagtactgcaaagggtgctgctgctggtcagttccatggcggggtagatgaactaccagcaagttatgacaacaaatcatttgtacttaagcagggcgagagagtggtgcagcctgaagcgaataagaaattaacagcattcttggataaacaagaaggtggaagtacttcaggtgatattaccgttaacgcaccattgatcatccagggtgatgtagctgatgatgacaagaaatttaatgagatgcttaagaaacacgccaatagtgtttctcaagctgtgagaagtagtcaaaaacgtaatacataagaaagcccagttagggattttccgtgtgataagacaaatattgtgaaagagaagatgaaagggtatagagattgtaatactcttcccgcaataatttaactttaggtggtgagtatttaatattgtatgcaagctgtgttgaaagagtacgtaatctcgataatgaataataactctttacgatggcatctacttctttttttgggagtgatgctaatttttctaattgggaataatatacatcatcatgcaaataagaaacggcagttgctactcttttaatagcttctgtatcttcagttggaagaggaatacatatttcatatgtgcctaacacctgagactcatcgccaccagtagcaagagctaaaaggttattgttgatttcgctcaataagattacacgcatcttaaaaacatcatctgaactttctttccatttatcatatgcgttatagcctatttggcctgcaaataacaacatagcaacgatgacggatgcagcctgccaatcaagcctgttaaaaaaaatacgaatcgaggtttttaaataaataaagaaagaagatattcgaggtaacaaaatggcatccttttcaaatcaaataaaagtaacgaactttcaaattaaaagtactgaaccgatctattctaatcaaacatggacaggtcaacgtatcatgagaagtactggaattcaatactatcaaattcagttcacccttaattttaatcctgcatcactaaatgaagtgaatagctttttagctcaatatgcacagggcaaacctttcactatgtcattggggcttgcaggtacatattacggtaaacagactggtgcagtaaccgctactgctctcactaaaccgggtaatatggttgtacctatcagtactaacacattagctgtgggtgagtgggtacagttttccaatcacaataagctatatcgaatcgtagaacgtaccagtacttcaattactattttccctgctctacaaaatacagtacaggcaagtgaagcactcaaatataacaatctcatgatcgaggctgtattagatccagacaatgattattcattgcctattgggaacatcatgaatattacattgaaagcaacggagaatatcatctaatggactcaggtatatatactaatgctaatcttcttaagtactggaagttagtcagaggtacaaccaagacaagattaacactaatggaaattatgagcttaggcgttaatgttacttgttttgatgtactaccaaaaggtactaatggttttcactggacggattcactaattgatatagatctggatggttataagtacataagtttccccgacattatcagtggttcattaccttcatattctgaacaaaagggcatgtctaatgatgctatcaattttaaaattagcaatgtaaacgcctcggttcgtgctcttgcccttggtggtttcttgaaagatgcacagatgaatatcaagttagtaattctcaatccatatgatagtactgtaattgattcaatgctcatgtttacggggtttattgactatgtacaggcagtaactgatccaaatcagaagcaaaacgaaatgactatatatgtgaattctgtctataagaaattagacagacaacctgcattaattgccgccaactcagtatatcaatcttactatagaaatgatgagtactttagtctgttaggtcaagttaatcaaaatcagaactggaaatacaagtaatgaaaaatctacataatgaagtaatgagtattattcagtactcaattgataacccatataagtatggtgataacgattgcaacattatagtactacgccttattgatttaattaatggtactacacagttaactaatcgccagtattcgagcattaaagaaggtatagcaggtttaaacaaggaaggatggaaccatacaggggaaattgttgaagcgtactgtaagccagtacaagccactatagacggtgatatctggttagatcctgacaacccattaattatggcagtagtggcatctggtcgggtacttggagtaaatgctgatcatgatggtttcgaacttcaaccaaaaccaacagagggaacatattacagagtaaggaaacagagagatgggtaagagtttagggggcttttttggagccataattacggcagttgtcgtcgcggctgctgtgtacttttcaggaggtacagcattagcagcaataggttggggtgcagcagccggatctttgtcattagttgcaagttctatgttaggtcaaatcggggtttctggatacggtgatgtagcagactcactaagtagaagtacttcaccaactactggattacccgttatatacggtggagaactaccacataaaaatggtgtatcaggcggttccttcatcctaaccggaagcatagtagcctggtacaacgtaccaaattctgattctcagtacttattctcagaacaggctgtagcatatgctggtgtagaaaagcatatcgagcaaatctatattgataatgagccagtacttgcagtaccgattacagcagagggtgtagtacctaaagaaagtattgcagcgaagtaccagaactatttgcaattagaagtacgatttggtggttagactggccccctgaatctccagacaaccagtatcacttaaataagtgatagtcttaatactagtttttagactagtcattggagtacagatgattgatgtcttagggccggagaaacgcagacggcgtaccacacaggaaaagatcgcaattgttcagcagagctttgaaccggggatgacggtctccctcgttgcccggcaacatggtgtagcagccagccagttatttctctggcgtaagcaataccaggaaggaagtcttactgctgtcgccgccggagaacaggttgttcctgcctctgaacttgctgccgccatgaagcagattaaagaactccagcgcctgctcggcaagaaaacgatggaaaatgaactcctcaaagaagccgttgaatatggacgggcaaaaaagtggatagcgcacgcgcccttattgcccggggatggggagtaagcttagtcagccgttgtctccgggtgtcgcgtgcgcagttgcacgtcattctcagacgaaccgatgactggatggatggccgccgcagtcgtcacactgatgatacggatgtgcttctccgtatacaccatgttatcggagagctgcccacgtatggttatcgtcgggtatgggcgctgcttcgcagacaggcagaacttgatggtatgcctgcgatcaatgccaaacgtgtttaccggatcatgcgccagaatgcgctgttgcttgagcgaaaacctgctgtaccgccatcgaaacgggcacatacaggcagagtggccgtgaaagaaagcaatcagcgatggtgctctgacgggttcgagttctgctgtgataacggagagagactgcgtgtcacgttcgcgctggactgctgtgatcgtgaggcactgcactgggcggtgactaccggcggcttcaacagtgaaacagtacaggacgtcatgctgggagcggtggaacgccgcttcggcaacgatcttccgtcgtctccagtggagtggctgacggataatggttcatgctaccgggctaatgaaacacgccagttcgcccggatgttgggacttgaaccgaagaacacggcggtgcggagtccggagagtaacggaatagcagagagcttcgtgaaaacgataaagcgtgactacatcagtatcatgcccaaaccagacgggttaacggcagcaaagaaccttgcagaggcgttcgagcattataacgaatggcatccgcatagtgcgctgggttatcgctcgccacgggaatatctgcggcagcgggcttgtaatgggttaagtgataacagatgtctggaaatataggggcaaatccagtggtgactatacgagtactaaaactcttgctgcaaaatatgctggttcgaaatggacaaataaatttcttggtaagggtattgttagtatcagtaccgttatcttaaaaactcaagattcattagaaaataatattcttgttaatgatcaattcgctttaactgtagaaatgaaagggcaggtgatttatgattttgttgatggtacttataaagcaagtagtaaccctccttcaattatctatgattacttaacaaattcaatctatggtatgggtattgatccatcattgattaataccgatacgtttgcagaaaccgcagcatattgtgatgcttttgaatattatgctaatggtgctatcagttatcaaaaaacctataaagataatattgaaaatatctgtcagtcatttggcggcatcatgtatgtacatgccggacaaatctgtattaccacagaccgcaaatcggtatccgtagcctcatttgatgagcgtaacatggtaggggcggtacaggtttctacttctggcggtactgactacttcaacgtagtcgattgcaagtttactaaccctgaatcgatgtacaccactgacgtagtacgtatcccttccgatatcactacggatgaagcagtacagcatgatggacaggtcatagcattatcacgcgattactcatggtcatatgatcaagaggtgattgcaaaaatggctaacgttgatgtactcaaggctaagtatgccctgcgtactatcagcttcaccacaagtgaaggttgggatctcgaagtatgggatgcgatcaatgtcagcaatgaagaactcgctatctcaggcaaatttaaagtactcaataaagatatcagcaccgatcaagagaacgttggctatgtaaccatcacggcagtagaagcacctgatgcaatgtatgatggtattgatccgggtatctggtcgcctggtggggtaattaacttccctgaactacaggtactaccgccaacgaacctacaggcagtacgtaaggggaatactacttctggttcaatcgtggatcttacctgggatgcttcaccagatccgtatctgcgtgggtactatgtttactaccgtcttaacggttccagtacctggacgtatgcggggcagactggcgtacagaagcttgattatgaattatttggattgtctgatactgcaagctacgacttttcggtagaggcttacaacaacttagggctggtatccaagaagctttccctaactggcattgttccaacattcaactttgcactacctgcggtaacgcgtgtagtactgacaaataaaacagaatcagcgtatgtaactgactcaccagatttcaatattgcctgggattcacaaaaagatatcagagtgaataaccgatcatttagtgagtacttcaagtattacgttattaaaatctatgacggtactaaattagtagatacattctatacgcaaagtaatgcctttaatttcactcttgaaatgaaccgtctgaaagtacgtaagcctaccattggtattatcgcacagggatttaatgatggtacatattcagaggaagtgaaaataaccgtagagaataaacagtgtggtttagtagaggatgttagctttacgggtggttttggtaatttgtttgcttcatggactaaatctactgaacgtgattatgcaggtgcgattatcagtattgttaatggtactaatacacgtatattcaccagttatgcacctgaatttgattcaataccaaacatcactgatggtgagtataaggttaagatgggattctttgatgtgtttggtactgatgatattcaatattgtccagaacaaacaatcagtatcaactccaagtaccagtttaccgaagatgatgcagaggcaattaacgggattcttgatttagaagatcgcctgactggtaccattaatgatgcggtcaaaattgccaataagaataccagtactgttatcagtgcatcagaggcacgtaccaatgataaaatcactgccagtgagaaaacgttaagtactcagatcactggggtaaatagttccttatcacagaaacttagcaccgttgaaagtactgccaatggtaacaaggccagtatccagacactatcccagacggtaacggataacaacaaagctcagactacagcagtctcacagctacgtagtgatgtgaatggacagattgccactgttaaccagtcaatgagtactaaagccgataaatctactgtagatgctcagtactcactatgaagtggtcaacaaaaactggccaccgagttagagtttttccagtatcgattttccgattcgtttgggggtaacccaccgttatattcgtgcggtcttagtgcgctgtaatatccaacgatatagtccgttatggcgtgagctgcctcgctgaagcttacgtaacccaccaccggcatccattcgttcttcagactcctgaagaagcgttccattgggctgttatcccagcagtttccgcgccggctcatactctgtctgatctggtatcgccacaataactgccggaactgcctgctcgtataatgactgccctgatcgctgtggaacatcaccccgccgggcttaccacgggtttcccatgccatttccagcgctttcatggtgagcctgctgtccggcgagaacgacatggcccagcccactggttttcttgcgaacaggtcgagaacaacggcgaggtacgcccagcgcttacccgtccagatataggtcacatcaccgcaccacacctgatttggctcggtcacggcgaactgcctttcaaggtagttagggatagcaacatgttcatgaccaccacgtttataccggtgagtcggctgctgacagctgaccagccccagctctttcatgagcctgccagcaagccagcgtcccatctggtagcctctccgggttgccattgtggcgatgcttcttgctccggccgaaccgtggctgatgccatgtagctcaagtacctgactgcgtaatacagcccgtctgccgtctggtttttcaggacggtttttccagtatctgtagctgctgcgatgaaccccgaacacatggcagagtgtgaccacaggataatgcgctctgagtttcccgattatcgagaactgttcagggagtctgacatcaagagcgcggtagccttttttaatatttcattctccatttcaatgcgttgtagctttttcctcagcttacgtatttcgatttgttctggtgttatcggagaggcttttggtgttttgccctgacgctcatcacgcagttgtttgacccatcttgtcattgtggaaaggccaacatccatagctttggcggcatctgccaccgtgtatttctggtcaacaaccagttgagcggattcgcgtttaaactctgcgctaaaatttctttttttcattggagcacctgtgttgttctgaggtgagcatatcacctctgttcaggtggccaaattcagtgtgccacttcactatcagtacaggctaatggcacggtagctggtatgcgtcttgttgcgagtagtggaacgagtaacaactcagcaatctatttcgctgcgaacaagttcatagtctccggtactgacactgctactgtaggtggtactgcaccatttgccatagtcaacggtactacatacttgaagacggcaatgatacaggcggcaagtatcggtactggttacatcgctgatgcggcaattaccaatctaaaactggcctccggctcagtgaatacattaaacgtggttgatggttgtataactacagccaaaatctcaaatactattcaaagtactaattacgtagcaaataaaacaggctggcaaatcaataaagcaggtacgatcctaatcaatggaacgggtggtactggtagaatggtaatcagtaataatattattcaaatctatgacaataataatacgttacgtgtacgtatgggtttatggtaataaataattcagggattattaactgtaacctcatttcaaaaggatacataaatgaaatctaatgaacgtactttcaatagtaccagtactaacccattcagtattagcggaaaagaaacaattggaatgaagaaaaggatttacaggagtaagagctatggcacagggattacaatgttggaatgcagcgggtgtattagtagtagatctgactgattataacatacgttttatgggtacttatactgtcaaggctacttctgcacagacctatactgtatcagtaccaaatatgaaaactacaggctggtttgtacactatgcccccgccagtgatacctttaatgagtggtcagccttttgtaataatgggtcatttactgcggtttatttgccaacatatgcaccgttagctggtaactacacttttaacgtatataagtggacggcgtaagatggcaggtttcgaggtatataattcagcgggtgcactgactatagatagtactaacaagtcgataatgacgggtgcagtaaaggccatgggaaatctaactgatacgggatactacacaggctttacctgtgccttcggtaatggtggatcgctcggtttcgttatgccatcagtagtagctaacaggaacacaacacagtactggttccagatacagaaagacggggcatggtgtttccctggtgcctatatgttccagcctggcatgggcaggttcatgacaagtagtcacacggctacccccacatctggttttcttgatgtgttcagtgaagaaggtactttaatctggtctgctgcatcagcggcaacaatgccacgtatcaggggatttttgacagcacctgcggctaccgatctcagtactgccattacggtaacgtctccagtagctgatccctggttctgctggtcacaatgtccggggaacatatcagatgatggtacagtaattgggtactctggtctggttatcaggcgtaattccagtacttcattcagtctacagtacgtttcaaagaaccagaaaacctaccgccaggcaatggggaataatggtatccagatagcattggcgacatttacagggtattaatacaataacaataacaataacaataacaataacaacaaagggatttcagtatggatatcggtgctattttagctcttgttatttctggatgcgtattcctttatactatctttagagataatacaaaggatacgaatgatctattaactcgcgttgctactcttgaaactaccattgctgtactggaaagtagtatttcccgtattgaggatgatcaggataagatgagagatacactaagtaaactggaaacacaaatccatgaacttgatgttaagattgaaaggattattgcaattcttcagcagaaacaacgaccataaaaaaaggcatagtatgtcattcgtactatgccttttctttatttgtttttaagtactgcaatcatggaattcacacggtttggtgtctgcctgtaccatagagaacacttagcctgtttaattgcttcaaggtaatcatgtgctttcagggctgctaacatcttacggaatttcttcaccccgccaatacctaactggaaggtcatgataataataaaatcattccagtcatcgggaagatttaaccctaatgtctgtacctgcataattgttttggctaaatcgcgagatagtaacttgtctgcttcgctttcagtaatgccagtactaaaatcttctcccgcctgaattaagtgaccatatccaatagtactacatcctaaactatcagcatatggatagaatttcccatttctgaagtacttcaaatttgcctgatactctttagtaccttcatattcttttaatcgtgtttttaaatcgctcatttactaaatacctataatgaatttataggaatatttatgatgagtgaatggaaatactcggatgattggagcgaggaggaaatgttatccggtgaatatgctggtttcgtttatatctttcagtttgaggatggttctaattatgtcggtgctaagcaaatctatcagcgggttaaggatgcgagaaagctaaagcccacttcaaaggaaaatggctggcgtgagtacctcagtagttccaatgtcgttaaaaacaaaattgaaaatggtgaacagtactcaaaaacgattctatggtgcttcgcaactatgcgagaggtaatgattgtagaggcaatactgatccttcatcagatgcttaaaccggaatgtttgaatctggcaatgatgagtaagattagatcaccaaatgcaaaggataaaaaaagactactcggaatagtacaggaactattggagtacttgaattgaggtaaatatatggcaagtggaataaatgggattggtagtataaggaactatatacaaacgcagggagttagattaaataatcaattccagaatgaaataattaaacgttccaagctactatcccaaagaatgcagggtgatttgaataatagcgttgaccgtggggcagtgggctttactcaacgttccatccttttcttctatagaaaggttgggagaaattcagttacatcgaccatcatggttaaagatattcaggctaagtacctttatcaagtactggtacagccaaaggcaattgataagtttatacctacttcatctacaagattaactaagcagggcaacatttcaggactgaaaaagaatcttttaagtgaacgatataaggtagtgaagggtaagaatggtaaagaacgattaattgataccgcaaagaaagataccaagaagaaaaccaaacgtgtaattggcttacgtgagaagaaacaacgtcgccttatctatgacttctataaggaagccaatgatggtgtaagggtaattatgagcggtattcagggaacattcaggataagtagacaatgaattttgagcaacattatggtgatttaataagcaagattaagctaaatggcatgacaccagatggtaatagtatgccaattaacaaatgttttcttgataagaaatttcaaaaggtcgttaagaaaagtaattatcagattgatagctatatgaacgttatttatgagaagaagaaagatttcaaagttggtgaagtacttgaatgggaattacagggtgaaaagatgcctgtatttctaattgagagtaaaaagctctttgtgaagggtaaacatttttgggtatatgccgtggggattattgaatgattagtatattgattgagtttctgaagtcaggattggattttttcattaagaagaaaactattgaacaggaagtaaagaaaacgaatgtagaagggcagattgaaacgaataaagaagagattgaaaaggtaacattccactggcgtaatgccctcggttttgtactaacccttatcattctctataactggatcatagtaccagtacttgatgcttttggaattattgtgatccaagttccattaggacaacttttgcaagtgctattgattatggttggtggaagctgaaagatttttcctttaatatgtgttttgagttaataaaatagcaatctaaggatttgatttatgagtgatgcaattactacagcagcaataaaaaaattgtatggactatccgctgggcaatgtaatatttgccgaacttctctttttaaagagcaggttcacatcggacaaatggctcatgtaatagccaaaagcccaaaaggaccaaggggcgatgacctgttagcaaatgacaattcttatgaaaatcttatcctgctttgtgcaaatgatcatattcttgttgatagagatccattcacttatacagtagaaaaattgcatcaaatcaaaagtgaacatgaggcttatatacagggtgcaaccgataatacattattttcagataaaaaaagacagtcagatgtggactttttaaacgcttacttccactttacaccgtttgcgagggtacgttcattagttgaaactttacctaattcttttcacatcaatcttcttatttttggagatcagtttgatagtattttaagggattttccagcgagctatcctttaaatgataaattactccacggtcatttccaaagttttattgattcgtataaaaatattgattttatcatatctggacatttgccgatttccgataatagaaacattcaggtgtttggtggtgcgaatcataatcttctttgtcatttcaattatgatgagctaccatccgataaagcactgataatagaacaagatttgatttcacataaaatatctcttcttaatgcttatgaaggtcttataaattaccttagagcttattaccctgaggtggaaatttactctcctattctatgagtgttatgaaatatataaaagccccttatggggctttttttatggttgttgtaatagtaatggtttcttcgttttctctaaaaaccgaatggctttgttttattatttccctaacatctggtttctttattttttttgtaatttaataaagccgaaactaaaacagaaacaaaaagtataagtgatactatacaaatagttaaaccttctaaaggtgatagttgggggtctatatataatccatacatagaaacagcggagatagcaataccgaaaaccatccacatatctatagggcttttatttgtcgatttgaccgtagtgtactttttgactaagtccgtacctgatagcactgttaaaattaatgataatatagcgagggcagtatttacattaaaatttagcttagcgaataaaagcaacattagtaaaataaaaataagtaacgctatgattaaaaatattcctttcttgtccataaataccccgtcgtatttttaaaaaaggtatcttatggcaaggataagtaaaaaggaatctgctaatcacaataaagtgatggaattaatacattcagataagctcctaacacaagaagatagggaattcatattcaccaattataggggggatgggataggggctacaggtgccttcttcacacctgaaattttagcatgggattttgtacttgatgctgactgtactggtgactgtattgaactatgtgctggtatcggtcgcctcagctactaccagtacttaaggaataaaccaacgcatattacatgcgtggaactcaatcctgagtacgtaatgatcgggaagagggtactaccagaggcagaatggatcactggtaacgcactacagtactcaccagaccgtttctatgatgttgcctatggtaatccaccctttgggaagatcagtacctcaaaagcgtatacaggccgttataagggtagtgaatttgaatacaaggtgattgaacatgcaagtacctttgcgtcctatggtgcatggatagtaccgcaaggttccgcaggctttgtctacagtggggtacattgttatgagcgtagagaatcatgtaagtaccagaagtttgtgaaggatactggctatgagctacatccaggtgtaggcatcgatacaagtatctacagggatgaatggaatggtactaaggtgatatgcgaatcggtgttagtagatgatgacggtacaaatctgtaactaaattagttaagaaatcataaagatagtagtacttgcaaatgttcccattgatgaagttatgcgtcctttcgttttttagcacaggttaagagccgttcatatgaatagtagaggctcccggaagaggtaaactgaacgacgtctcttgctaaaacacagcaactctcatgccattttatcgacgatgagaacaacgtgcccggtgatacaccttcaaaattaagcgtagatggcaaatggaaaacttgcctgcacggctttcttaatttcaatggcatatcaacaactcatccataaattttgcataattaatgtaaagacaaggctcgccagtaacgctaaattcatttggctgtaagcgcggtgtcatccgcgtcaggaaaattaaacagttactttaaaaaatgaaaacgtaaaaaggttgggtttcgatgtattgacgggtaaactttgtcgcccgctaaacatttgtttaaggaatgattaattgtgaccaaactcaaacttctggcacttggagtgcttatcgcaacgtctgcaggcgtagcgcacgctgaaggtaaattttccctgggcgcaggcgtcggtgtcgttgaacacccatataaagattacgataccgatgtttacccagtaccggtaatcaactatgaaggcgataacttctggttccgtggcttaggtggtggttactacctgtggaatgacgcaacggacaaactttcaattaccgcttattggtcgccgctttacttcaaagcgaaagacagtggcgatcaccaaatgcgtcacctggatgaccgtaagagcaccatgatggctggtctgtcttatgctcactttacccagtacggttacctgcgtaccaccctggctggcgataccctggataacagcaacggcattgtctgggatatggcctggttgtatcgttacaccaacggcggcctgacagtgaccccgggtatcggtgtgcagtggaacagcgaaaaccagaacgaatactattatggcgtatcgcgcaaagagtccgctcgcagcggtctgcgtggctataacccgaacgacagctggagcccttacctggagctgagcgccagctacaacttcctcggcgactggagtgtttacggtaccgcgcgctatacccgtctgtctgatgaagttactgacagcccgatggtggataaatcctggactggcctgatttctaccgggatcacctacaaattctgataatgcatctttccagggcattttgtgcataaaaacagggcgtcacgccctgttttgcattacggtggtgcaatacctgggaggaaacaatgcaacaaaaaatgattcaatttagtggcgatgtctcactgccagccatagggcagggaacatggtatatgggcgaagatgccagtcagcgcaaaacagaagttgctgcactacgcgcgggcattgagctcggtttaaccctcattgataccgccgaaatgtatgccgatggcggtgccgaaaaggtggttggggaagcattaaccggtctgcgtgataacgtctttctcgtctctaaagtctatccgtggaatgctggcgggcaaaaagcgataaatgcatgcgaagccagtttacgccgtctcaatactgattatctcgatctctacttattacacaggtctggcagtttcgcttttgaagagactgttgcagcgatggaaaaattgatcgcccagggaaaaatccgccgctggggcgtttctaaccttgattatgctgatatgcaggaactctggcagctgccggggggaaatcagtgtgccactaatcaggtgctttaccatctcggttcacgagggattgagtacgatctactcccctggtgccagcaacagcagatgccggtgatggcttacagtccattagcccaggccgggcggttgcgcaatggactgttaaaaaacgcggtagtcaacgaaattgcacatgctcacaatatcagctcggcacaagtattgttggcgtgggtaatcagccatcagggtgtgatggcgattccaaaagcggccacgattgcccatgttcaacagaatgcggctgtgcttgaggtcgaactttcgtcagcggaattaaccatgctggataaagcgtatccggcaccaaaaggaaaaactgcgctggatatggtgtgatgttgatacgtgccggatgcatcgcacccggcacacaacattaacgcaaattaacgtttcgcaacgcgaatggattgcgccagatgtgcaggtttctctttggtgactttttgcgtttctgaagcgtaagccgtttctacacaaacaaatgttttgtagccatcatccggcatatcgcccatgctaattgaaagcgccggtcccgggttccagcctacaacgttcagatgatgctggtggcctacggcgataatacgattcagcgcttcatcattaatcacgctgcaatcttgcggattcagatacacgcgatcggtacggtcagggaaggtctgaataccgtcggtcagtacatcttctttcgcgtcattcactttatcaatgaagcgatcgcccagcccactgacgcttaccttagcgatatcacccacgttaaagtaggtatgcagggcagaggtggtttcaaattcgccatgtgattcaagatcgatttcacaggttttacccacgcggaaatgcgctaacagcgtaaagtcgtgcggacagaattttttcgtctcttcgctttgcgtcaattcaaaagtcagcgctacgccatcagcatcttcattatgtgatttcagcgtccacggcaggttgcgggcaaaaccgtgcgcaggcagaccttgttgtgccgccggaccaaaccacggccagcaaaccggtacgccaccgcgaatagcgacgccatttttgaacggtgtgttgttgctcaaccacagaacttcttcttcacccgcaggtttccacgagagaaggtgtgcgccctgtaatgcaaaagaggcttttacttggggatgatcgaccacaatgaggtccagttcatccagtttacgacgggagaggacaggggagatttgttcgatgaccggaagggcaaaaattttcttaatcatgacgcagtcctttaacttcattttatcaggtaaaaaaaagagcgaccgaagtcgctctttttagatcacagtttcatctcaacttatttggagatgtgagcgatcaggtccagaactttgttggagtaaccggtttcgttgtcgtaccaggataccagtttcacgaagttgtcgttcagagcgataccagctttagcatcgaacacggaagtgcaaacttcgccgttgaaatcggtagatactacgtcatcttcggtgtagcccagaacgcctttcatttcgccttcagcagcggctttaacggcagctttgatctgctcgtaagttgcagctttttccagacgaacggtcaggtcaactacggatacgttcggggtcggaacgcggaacgccataccagtcagtttgccattcagttctggcagtactttacctacagctttagcagcaccggtagaggacgggatgatgttctgggaagcgccgcggccgccgcgccagtctttgtgagacgggccatcaacggttttctgagtagcggtagtagcgtgaacggtggtcatcagaccttcgatgatgccgaagttatcgttgataactttagccagcggagccaggcagttggtggtgcaggaagcgttggaaacgatgtcctggccagcatatttgtcgaagttagcgcctttaacgaacatcggagtgttgtctttagacggaccagtcataaccactttcttcgcaccagcggtgatgtgtttacgagcagtttcgtcagtcaggaacagaccagttgcttcagcgacaacgtcaacaccaacttcgtcccatttcaggttagccggatcacgttcagcggtaacacggatttttttaccgttaacgatcagatgaccgtctttcacttcaacggtaccgtcgaaacggccgtgagtggagtcatatttcagcatgtatgccatgtaatcagcgtctaacaggtcgttgattgcaacgatctcgatgtcagaacgtttctgagcagcacggaaaacaatgcgaccgatacggccaaaaccgttgatacctactttgatagtcatatattccaccagctatttgttagtgaataaaaggttgcctgtaaaattacaaaaaccttacgcagcgtcaagcggaatcgtgtcaatcattgcgacaaatcaatcctgtgcctaagcattacgcgactgactcgcctcactcttcctttgggcttgaaaccacatggggtcggcgccccgaattttaaagggcaattacgataaaaatgtgattttcatcacgatttaggtgcagccatttcgtcgagatcaagtttaggacaaaattttgccagttggtgttaatgttttgttagaatcagtcacgtaatgtgagcacgattaaagtgagatgtgagcaaatggctaataaaccttcggcagaagaactgaaaaaaaatttgtccgagatgcagttttacgtgacgcagaatcatgggacagagccgccatttacgggtcgtttactgcataacaagcgtgacggcgtatatcactgtttgatctgcgatgccccgctgtttcattcccaaaccaagtatgattccggctgtggttggcccagtttctacgaaccggtgagtgaagaatccattcgttatatcaaagacttgtcacatggaatgcagcgcatagaaattcgttgcggtaactgtgatgcccatctggggcatgtcttccctgacgggccgcagccaacgggcgaacgttattgtgttaactctgcttctttacgcttcactgatggcgaaaacggcgaagaaatcaacggttgaaaaaacgattcagcaacttattccacaggagcggaaaaattatgaatcttgatgacattatcaacagcatgacgcctgaggtataccagcgtttgtcgaccgccgttgaactggggaaatggcccgatggcgttgcgttgaccgaggaacaaaaagcgaactgcctgcaactggtgatgctgtggcaagctcgccataataccgaagcacagcatatgacaattgacacaaatggtcagatggtcatgaagagcaaacagcagttaaaagaagattttggtatctcagcaaagcctattgctatgtttaagtgaatgagttatctagtatttaagcctgttattaagggagggcaaatatacttgttaggacgtcgtgttttagctgcaagtaggttaaatgcaacactgacaagtattatctggcctacaatgtcattgaggaaatgtaggccagagatgaattcaactaatattacccctgtgtctcttcccagtctgccagcgtatatagcgttgccccagctgctgacatctccataaacgcgtgcgcactgtcctggggctggatattcacgccacgacaaccatcggtaatcacatttaccttataacctaactgtaacgcgtccagcacggtaaacttcacgcaatagtcagtagccaggcccataacgatcaattcatcgatttcatgatcgcgtaaccagtcatcgagcgaggttttctgccgacggccgttatcaaaaaaggcactgtaactgtcaactaaaggattttcgcctttatggaacaccgctgcgatcgctttttggttcagtaacggatgtaattgtgcgccttcactgttctgcacacagtgatctggccagaaggtttgtggcaaaccgtcgagttggcctggcgtataaggctctacaccgtgctgactggcaaaactgccgtgattcgccgggtgccagtcctgactggcgataaccgcttcaccgcgcgactggcaccagtcaatcaggcggttagcgacatccaccgtactgtcaccttccggcacggcgagcgcgccaccagcacagaaatcattttgtaaatcgaccagtaacagggcgcgagggggcattacagtctccttaatcatccggcgtcagttcgccgcgcaggttttggctcatggccttgcgaatggtttcagtatccagttcctggctcagcaggtaatgcagtttggttagcgtggcttctacagtcatatctgcaccgccaataacgccggcatgggcgagggcgttaccggtggcataaccacccatattcactttaccggacatacattgtgtcaggttgaccaccacaataccgcgatcgctggcttcttgtaattcctgcaggaaggctttgttttgtggcgcattacccacgccataggagcgcagaatcaatgctttcaccggttggcgcagaaaattgcgcacgacgtcagcagaaatccctggataaatcgtcactacgccaattggttgtggcgtgattggatgaacgattaattccccttcaccgtgcggggcgggtggcgtattcaaacgacgaatatggataccagcttccagtaacggaggaaggtttggagaggcaaacgcatcaaaaccatcggcatgggctttggtagtgcggttgccgcgatacaatcggttattgaaaaagagcgttacttcgttgatcggataattcgccgcaacgtacaacgcattcagcagattaatttgtccgtcagagcgtaactcagccagcgggatttgtgaccctgtcacaatgaccggtttaccgagattctcgagcatgaacgacagcgcagaggcagtatacgccatcgtgtcggtgccgtgcaggatgacaaaaccatcatagtcgtcatagtgcgctttaatatcttcagcaatatgctgccagtcttctggcgtcatatcagaagaatccatcagcggcgtatattcatgaatggtgaaatctggcatctccgggcgatggaattccggcatcagcgccagttggcgttgtagatgacctgacaccggaatataaccctgctcggaacgctgcatcccgatggtcccgcccgtgtaggcgacgtaaattgatttcttttgcatgatattgatatgaatgatatcgaaagagcaaaagtatatacgtgaggcaggaggagcgcacctgatactatgcggataaggaaatatggggcgagacagcgggaagaggattcgtcgacgtaaaaaataatgtggccgacgatctgtcggccactcagtacaagacttaacgcacgttggcgcaggtcaggcaaaacgcataacggttttgtgggtcgttaaacgcggccagcttgtcgctttcacttttaacggtagaggctaccgaggcaagcggtgcaggtaacatggcctggaacgcatctggcaacattgcccggacagaaccagacatgttgtccatcactttgtcgaagaaggtcggttcatcaacgtagtattccagatgccactgtttcacttttgccagctctgctgctttggcgaccgcatcatcgaaatccccgagactatcgaccagcccgttagcttttgcatcctgaccggtccagacgtggccctgggcgattttatcaatctgctccggcgtcgaatgacgcgcatcagcaaccagcgtgataaagcgtttatagccattctcaatgcttaattgcatcatctgctgcgcttccggcggcagtgccctggtgatagaaacatccgccagcggtgaagttgagacaccatcagtatgaacaccaatcgaatccagactattttctacggtggtgatcacgccgaagataccgatagaaccggtcagggtgctggggttagccacaatgtaattagctggcgtggaaatccagtaaccaccagatgccgccatgccgcccatcgatacaaccacaggcttacccgctgcccgggctgctgccagttcagcgcgaatcacttcagacgcggtaacgctgccgcctgggctattaacacgcaggacaatcgctttcactttcgggtcaaggcgagcgtcgcggatttgtgccgcagtggtatcaccgccaacattcccctgagtttcctcgccatccataattgcgccattagcgaagacgacaccgatgctgtcaccggtatctgccggcgttttcaatgcgtaatcgtaataactgatggcgcgataatttttatcagtcttactccagccgaactctttggttagagctttttcgatttcggcactcgatgccagtgcatcgaccagcttgttttccagtgcatatttcgcggtatcgccaccggttttggttaaaccctcaagcaacccttgcgcgccagggaatacctgctgagcagggatctgccggttagcggcaacagtattcagatagttttgccacagctcaccaatccagcggctgtcagcttcgcgggctgccggtgacatgtcatcacgaataaacggttcaacggcagatttatacgtacccacgcggaacacatgggtggaaactttcagcttatccagcaacgatttgtagtacagaccgttggtagcaaaaccgtgcaaatccaccacgccttgcggtgacagccaaattttattggcgaaactggcgagataatattgcccctggctgtagttctcgccaacggcataaaccggtttcccgctgtcacgaaactctttcagggctttgccgatgtactgcatagacggctggtcgccgcctgcgaagtttttcagatccatcacgataccggtgatattgcggtcgtccttcgcctggcgaatggtgttgacgatatcaaacagtgagttttcctgcagacgatcggaactggcaccaagcagctggcggcttaatttactaaaccgctgagaactgtcgggtttatcgacgatcacaccagaaatgtccagcagcagtgcgccacgactggccgtttctttcgaatcaccaccactgacctgcatccagatccccacaccaaccagtacgaggaaaataaagaacaggttaagtaccatttcacggacgaaattcagcagacgccacgtccatttaaaaaatccggcaataaatcgccaaagggttcgcatgtattctcccaacttaaggtcacacctgtcacaggcgcaatagatgtggttatcgtaatgacccaaccggcacttgtcagcaggaattgcggactgtgctgtaacaaaatccactctcgtgttaattttgtgaataaatatcacgacaggagttaatcaaatggatgcactcgaactattgatcaatcgccgtagcgcctcccgcctggctgaacccgcgccaacgggtgaacaactgcaaaacatcctgcgtgcgggtatgcgtgcgccggaccataagtccatgcaaccgtggcatttttttgtgattgaaggggaagggcgcgagcgtttcagcgccgtactggaacagggggcgattgctgccggtagtgatgacaaagctatcgacaaagcccgtaatgcgccgttccgcgcaccgctcatcatcacggtggtggcgaaatgcgaagaaaatcataaagtcccgcgatgggaacaggaaatgtctgccggatgcgcggtcatggcgatgcaaatggcagccgttgcccagggatttggcggcatctggcgcagtggcgcattaactgaaagtccggtagtgcgtgaagcattcggttgccgtgagcaggataaaattgtcggttttctctacctcggcacgccgcagttgaaagcatctacgtcgattaacgtcccggacccgacgccgtttgtaacttatttctgataattgtcgcgaaactgtctggattgtgagcaaaggcgcaggaattcagacactctcacttatcacttcacggaatgagggttaccatacccggattgcattgacaggagatgtccatgagcgagaactcgattcgtttgacccaatacagccacggagctggttgcggctgtaaaatttccccaaaagtgttggaaaccatcctgcacagtgagcaggcgaagtttgttgatccgaatttgcttgtgggtaatgagacccgcgacgatgcggcggtgtacgatctgggcaatggcaccagcgttatcagtaccaccgacttctttatgccgatcgttgataatcctttcgattttggccgcattgcggcgactaacgccatcagcgatatcttcgcgatggggggcaaaccgattatggcgattgcgatcctcggctggccgattaacaaactttccccggaaattgcccgcgaagtaaccgaaggtggacgctatgcatgccgtcaggcgggtattgcgctggctggcggtcactccatcgatgcgccggagccgatttttggtctggcggtaacggggatcgtaccgaccgagcgggtgaagaaaaacagtaccgcacaagccggatgcaaactgttcctgacgaaaccgctggggatcggcgttcttaccacggctgagaaaaaatcactgctgaaaccagaacatcagggactagcgacggaagtgatgtgccggatgaacatcgcaggcgcgtcctttgccaacatcgaaggcgtaaaagcgatgaccgacgttacgggttttggtctgctgggccatttgagcgaaatgtgtcagggcgcaggtgtgcaggcgcgcgttgactatgacgcgatcccaaaattgccgggggttgaagagtacattaagttgggcgcagtgcctggcggcaccgaacgtaactttgccagctacggtcatctgatgggtgaaatgccgcgtgaagtgcgcgatttgctgtgcgatccgcaaacttctggcggtttgctgctggcggtcatgccggaagcagaaaatgaggtcaaagctacagccgccgagtttggcattgaactgacggcaattggcgaactggtgccagcgcgcggcggtcgtgccatggttgagattcgttaattcaatgcggttgtttattgccgaaaaaccgagtctggcgcgcgccattgctgatgtcctgcccaaaccgcaccggaaaggcgatggctttatcgagtgcggtaatggtcaggtggtgacctggtgtatcggtcacctgcttgagcaggcgcagccagacgcctacgacagccgctatgcgcgctggaatcttgcggatttgccgattgtcccggaaaagtggcaattacagccccgaccctccgtgaccaaacaacttaacgtcatcaaacgcttcctgcatgaagccagcgaaatcgttcacgccggggacccggatcgtgaagggcaactgctggtggatgaagtgctggactatctgcaactggcaccggaaaagcgccagcaggtgcagcgttgcttgataaacgacctgaacccgcaggcggttgagcgggcgctcgaccgtcttcggtccaacagtgagtttgtgccattgtgcgtttctgcgctggcgcgagcgcgtgccgactggctgtacggcatcaatatgacccgtgcgtataccattctcggtcgcaatgccggttatcagggcgtactttccgtgggacgcgtgcagacacccgtgctcgggctggtggtgcgccgcgatgaagagattgaaaacttcgtggcgaaagacttctttgaagtcaaagcacatatcgtgacacctgccgatgagcggtttaccgctatctggcaaccgagcgaagcgtgtgaaccgtaccaggatgaagaagggcgcttgttacatcgtccactggcggagcatgtggttaaccgcattagtggtcaaccagcaattgtcaccagctataacgataaacgggaatcagaatccgcgccgctgcctttttcgctttcggcgttgcagattgaagcggcaaaacgctttggtctgagcgcgcagaacgtgcttgatatctgccagaagctgtacgaaacgcacaagctaatcacttatccgcgttccgattgtcgctatttgccagaagaacattttgccggacgccacgcggtgatgaatgccatcagcgttcatgcaccagatctgttgctgcagccagtggtagatccagatatacgcaaccgctgttgggatgacaaaaaggtcgatgcacaccacgccatcatcccgaccgcacggagttcagccatcaacctgacggagaacgaagcgaaggtctataacctgattgcccgtcagtacttgatgcagttctgcccggatgtggtgttccgcaagtgtgttatcgaactggacattgccaaaggcaaatttgtcgctaaagcgcgttttcttgctgaagcaggctggcgcacgctgttaggcagcaaagagcgcgatgaagaaaacgacggtacgccattgcctgtggtggcgaaaggcgatgagttgctgtgtgaaaaaggtgaagtggtagagcggcaaacccagccgccgcgccattttaccgatgcaacactgctttcggcgatgaccgggatcgcgcgctttgtgcaggacaaagatctgaaaaagatccttcgtgcgaccgatggtctggggacagaagcaacccgtgccgggattattgaactgctgttcaagcgtggttttctgaccaaaaaagggcgctatatccactctaccgacgccggaaaagcgttattccattcgctgccagaaatggcgacgcgaccggacatgaccgcgcactgggaatcggtgctgacgcaaatcagcgaaaagcagtgtcgctatcaggactttatgcagccgctggtggggacgctatatcagcttattgatcaagccaaacgtacgccggtgcggcagtttcgcggcattgtggctccgggcagtggtggcagtgctgataagaaaaaggctgcaccgcgtaaacgtagtgcgaaaaaaagtccgccagcagatgaagtcggaagcggggcgatagcgtaagcgagtgaatctttcgtgctattcgagtcataggtaatgactccaacttattgatagtgttttatgttcagataatgcccgatgactttgtcatgcagctccaccgattttgagaacgacagcgacttccgtcccagccgtgccaggtgctgcctcagattcaggttatgccgctcaattcgctgcgtatatcgcttgctgattacgtgcagctttcccttcaggcgggattcatacagcggccagccatccgtcatccatatcaccacgtcaaagggtgacagcaggctcataagacgccccagcgtcgccatagtgcgttcaccgaatacgtgcgcaacaaccgtcttccggagactgtcatacgcgtaaaacagccagcgctggcgcgatttagccccgacatagccccactgttcgtccatttccgcgcagacgatgacgtcactgcccggctgtatgcgcgaggttaccgactgcggcctgagttttttaagtgacgtaaaatcgtgttgaggccaacgcccataatgcgtgcagttgcccggcatccaacgccattcatggccatatcaatgattttctggtgcgtaccgggttgagaagcggtgtaagtgaactgcagttgccatgttttacggcagtgagagcagagatagcgctgatgtccggcagtgcttttgccgttacgcaccaccccgtcagtagctgaacaggagggacagctgatagaaacagaagccactggagcacctcaaaaacaccatcatacactaaatcagtaagttggcagcatcacccgagtcatattctgaaatatccagcggatcaagaaaattcgttggatattttttttgcatggataaaattatcgcctctaaagtatgtaataacagggaatgtgatgaaaaaagttttattacaaaaccatcctgggagcgagaagtattcttttaatggctgggaaatatttaatagtaattttgaacggatgattaaagaaaataaggccatgctgctttgtaagtgggggttttatttaacatgtgttgtcgctgtaatgtttgtgttcgcagcgataacatccaacggtttgaatgaaagaggcctgattaccgcgggatgctcttttctttatctattaattatgatggggcttattgttcgggccggttttaaagcaaaaaaagaacaactgcattattatcaggctaaaggtattgagccgctcagtatcgagaagttacaggcgctacaattgatcgcaccttatcgattctatcataagcaatggtctgaaacgctagagttctggccgcgaaagcctgaacctggtaaagataccttccaatatcatgtgcttccttttgactcgatcgatatcatcagtaaaagacgcgagtctttagagaatcaatggggtatcgaagatagcgaaagttattgtgccttaatggagcattttctttctggcgaccatggagccaatacctttaaagcaaacatggaggaagccccagagcaggttatcgccttgttgaataaatttgctgtttttccctcagactatatctctgattgcgctaataatcgctccggtaaatcctcggcgaagctaatatgggcggcggaattatcatggatgacctcgatatcaagcacagcttttcaaaacgggacaattgaagaagaactggcctggcattatataatgcttgcttctcgaaaggcgcacgagttgttcgaaagcgaagaagattatcaaaaaaatagtctaatggggtttctttactggcatatctgctgctatcgcagaaagttaacggatgctgaacttgaagcgtgttatcgttacgacaagcaattttgggagcactacagtaagaaatgccgttggcccataagaaatgttccctggggagcatcatccgttaaatactcataaacgcctgaaattttgccgggggcgctgcgcttgcccggcctacattagagcgtaactgcaatgaattgtgcccatttgtaggcctgataagcgtagcgccatcaggcatttacaacttaaatcacaccctgcgccagcatcgcatcggcaaccttcacaaaaccggcaatgttcgcgccctgcacgtagttggtttgctcaccttcaccaccatgctcaacacaggcatggtggatatccagcatgatgtgatgcaaacgtgcgtcaactttctcggctttccagcccaggcgcgcagcgttttgtgccatttccaggcccgacgttgctacaccgccagcattagccgctttacccggtgcaaacagtacgcctgcctgctggaacagttcagtcgcttcgatggtggtcggcatatttgccccttcagcgacggctttaacgccattggcgataagctgatgcgcggcgtcaacatccagttcgttctgggtggcgcaaggcagggcgatatcaaccggtacagaccacggctgttggccttcgagatagaccagaccaaattctttggcgtaatctgccactcgaccatcgcggctggctttgatttcgataagacgtgccagtttctctttcgtgaatccgctttcatcaactacagtgccgctggagtctgacgcagtgatcacacgagcaccaaattccatcgctttttcgatagcgtactgggcgacgttgccggagccagaaacggaaacgcgcatcccttcaaaacccataccgtggcgttttaacattgcttctgtgaaataaaccagaccgtagccggtagcttccgggcgaataagactaccgccaaatgaaaggcccttaccggtgaagacgcaggcggtattgttggagagctttttcatcatccccgccataaagccgacttcacgaccaccaacgccgatatcacctgccggaacgtcggtatccgcgcccagatgacgataaagctcggtcatcagcgcctggcaaaaacgcatcacttcaccttcgctttttcctttcggatcgaaatcgctgccgcctttaccaccgcccatcggcagggtagtcagggcatttttgaaggtttgttcaaagccgaggaatttgagaatggaaaggttaactgacggatggaagcgcataccgcctttgtacgggccgatggcagagctgaactgcacacgccatgcacggttgacctgtatctggttgcgatcatcaacccataccacgcgaaactggatcacgcgctccggttcaaccagacgctccagtaatgacatctggcgatattttggattttgttcaagaaaaggccagagtgtggtcattacttcacgaacggcttgcgcgaactcggtttgattcgggtcgcgcttttggacatggttgaggaatgactccagagaatatgtctgatccatagatataaaacccttatatattaatacgattgtgcttatgttgtttatgtcatgtgcttttgcagttttcgactataccatcaagaatgtgacggtaagcaagaaaaaaatgacccgggaaagcaaattaataacgagagtaatctcataaccaaatgcgataactcagacgctaaagttttgccacccggctaccgttatcagttgcagagacaataacgttaaggagttccctgtgagtcgagcattgttcgccgtagtattagcatttccattaattgcactggctaacccgcattatcgtccggacgtggaggtaaacgtaccgccagaagtgttcagttcaggcgggcagtcagcgcagccctgtactcagtgctgcgtttatcaggatcaaaattattctgaaggggcggtaattaaagccgaaggaatactgctgtaatgccagcgggatgacaaaacccttagcactaatccgctgctctggcggcgcgtaaagccataaacgcctctaatagtggaatgtcagcaggggccagcggatattgcagcgcctcttcaggtgagcaccagaccagcgcctgatgttcatgtgcctgtaacgtcccgtggaagtcgggtacgtgccaggcatgaagatggataatccggcccgaaacttctcgctgatggctggcaacatactcacccacagttgcttcgatgcccaattcttcgtttaactcacgcaccagtgcctgctgctggctttcatccagctcgactttaccatcggcaaactcccataatcccgcctgatcgctctgggcggggcgttgcgcgagtaaaattttgccatcacgttcaatgatggcggcaacaacttcaatcattttcataaattacacacgggcagataagcgaaaaatgccataatatccgcactgttgctcaatcagaaaggctttatatttaaggagtgcctgtgctagaccgccatcttcatccccggattaaaccgttgttgcatcagtgcgtgcgggttcttgataaaccgggcattacgccagatggtttaacattagtgggatttgccatcggcgtgctggctctgccgtttctggcgctgggctggtatctggcggcgctagtcgtcattttgttgaacaggctgcttgatggtctggacggtgcgctggcgcggcgcagagagcttaccgacgcgggcggctttcttgatatttctcttgattttcggtgatgctgccaacttactgatttagtgtatgatggtgtttttgaggtgctccagtggcttctgtttctatcagctgtccctcctgttcagctactgacggggtggtgcgtaacggcaaaagcactgccggacatcagcgctatctctgctctcactgccgtaaaacatggcaactgcagttcacttacaccgcttctcaacccggtacgcaccagaaaatcattgatatggccatgaatggcgttggatgccgggcaacagcacgcattatgggcgttggcctcaacacgattttacgtcacttaaaaaactcaggccgcagtcggtaacctcgcgcatacagccgggcagtgacgtcatcgtctgcgcggaaatggacgaacagtggggctatgtcggggctaaatcgcgccagcgctggctgttttacgcgtatgacagtctccggaagacggttgttgcgcacgtattcggtgaacgcactatggcgacgctggggcgtcttatgagcctgctgtcaccctttgacgtggtgatatggatgacggatggctggccgctgtatgaatcccgcctgaagggaaagctgcacgtaatcagcaagcgatatacgcagcgaattgagcggcataacctgaatctgaggcagcacctggcacggctgggacggaagtcgctgtcgttctcaaaatcggtggagctgcatgacaaagtcatcgggcattatctgaacataaaacactatcaataagttggagtcattacccgattttctcttttacgcgctggtgccgtttggctttattcttgctgcaccggagcaaaatgcgctggcaggcggctggttgttgtttgcgtttatcggcacgggcagcagttttctcgcctttgctgcactggcagcaaaacatcagattgataaccccggttatgcacataagtcgttttactatctggggggattaaccgaaggcacagaaacgatcttactgtttgtgctgggatgtttattccctgcatggtttgcgtggtttgcgtggatcttcggtgcgttgtgctggatgacgacctttacgcgggtgtggagtgggtatctgacgctgaagtcgctccagcgtcagtaattgcaatgttatttgctactgtccgggccgcgttcaccggttgctaccggattttttggatcgctgctccattcgtaccagccgccgtcatacacggaaacattcttccaacccatggcgcgtgcgtacataaaggtttcggacgcgcgccagccggtgccgcagtagaatgaaacttgctgctctggtttgatattccacgctttccacatagcggtaatatcatcggcgctgcgcatggtgccatccgggttatgaaaatcttccatatgcgtcgagtcgctaccagcgtgtccccaacgtgctccggctatttcaccttttggtttaatatagctgtaaccgctggtcgtaccgataaattctggccacgaacgaatgctcaccagcgatgcatcctggcgatgcagcagtccacgggcctgttccatatcgagcatcaactgcggttgtgccgggatcttcacgccgaaatccggttccgctttcactttcggtggcgttcctcgctcaacaggcagtcccgcgtcggaccaggtttgccagccgccatccagcagacgcacatctttcacgcctgcgtagagcataatttgcgccacacgcgctccagcgtatacgtcacgcccgtacagaatgaccgtggtgtcatggcgaatgccgtgttttgccagcatcgcttttagttgttcatcagaaactttgttccacagcggttcgctttccacttcgttggtatcgatgtagtcagcaccgggaatatggctgataaggtaaagcttaggagcgccccaggccgcttcaatgactttccagtcaccggcaggtttcgccgtaacctctttaccttgttgcaggtcgtgcagccattgcggataaaccagctgctcaaagtgcggcagtttttgtagacgggaaggttcgcttagcgcgtcactcagaatggagatatgcgtaaaacctgctttttgcagtcgcgttttgacggcgtcgacatctttgtcattaccgtacagcgccaccggggcatcggctttcaggttatgttgcttgatccacgcgttgagctgttcggtgctcattttgtcgagccagctggcagagaggtttaaggcggcaggttcatgaccagaagggccatttaaggtttgtggccagccgttataaaacgcgctggggcgagtatctatcgctttgccattttgttgttgaagctggtcaagtgtaagaggcttcgccagttcagcggcccacgaagaagcgcaagccagccctaaagccattgccagcgcggtcatttgagaaacacgtttcatcgaaaatcccgacattgtagttttgagtgcgccattctgaactgacgcattgagaaaaactttgcgttatcgcagtttgttgtaattttctgaccactgcgccatatccagaacagaactatcagcaggaacatcctggagatcgtgcgttacctgaacgacggggatcgccagttcgcgaacttcgctgaacacccactggcgaaaattatcgcgcagagccacatcaagacggctgaatggctcatccaggagtaacgcttttggctgagcgagaagggcgcgcagcagggccacccgcgctcgctgaccgcctgataatgtcgcagggtcctggtgataagtttcagccagtcccgctcgatcaagcgcgtctttcacggcattgcgcctggcagtccccttgagcgtcgacagtagcgccagcagtaaattttgcccgacgctgaactggtcaaataacagtgcatcctggaaaagaatgccaatctgacgctgtgcggtgggtagcatgtcaatccgttgctcattgagccatagctcacctgtacaagaaaactgtccagccagtgcaccaatcatccatgaaaacagagtggattttccacagccagacggccccattaacgtgacgatgtcacctttatcaaccgtaaagttaacgtttgtcagcaagcggctttctggtaaacgtagcgaaacatttttcacgcagagcattagcggagtccttgtctgacataacctacccattttgcgactaacgcggtcagggcaaaaataataagcggtaacaacagttgccataaagcctgggcggcgagaataccgttgctgccgccgctgcttaatgccaccgcctcagtggtgagcgtcggaaaacgccccgcgcccagccacagcgtcggcatatactgcgcaatactgactgaaaatcccaccgcgaaggcaatcagcacagggcgcaacatgagtgggcatttcacgtaaaagaagattttggcccgcgaccagcccagtgtttgcgcaatcaaaattaaccgtgaatcaatgcgctgccaggcgggttgcaggataaacagcatccacggcattacccacagcagatgcccccagaccaccgccgtccagcttccatctaggttcagccatagcgccagcgtgtactggcccgccaccagtggcagatcgggcaatagaatgggcaaccatagccacaactggcgacgctgtggcccccattccagccacagcagtaacaggagcaaagcgatgaatgttgctaccagccccattgtcagactgttgatgagtgcttcactattgatcgtcgactgatccgcgaggatcgccagcagaaccacacacagcacaccggttaagggtaaaaaactcgccagcgtagtgcctggtaataaaggtgtggcaggcattgcgaatgccatctacgcggggaatagtgcgccgccagctgcgccatagcagatagctcagcaaaacgtaggcggcgagtaacagcatcagcagcagactggcgagtgcgcctttcgtttgttgatccgcgtcgccctgagttaaccactgccagctaattactgccagcgtcggtggattacctggcccaagaataatcgccacatccacgaccgaaagcgaccaggcaacaatcgccagcatcgccattgccagcgaaggcgcgacggagggcaacagcagccagttcaggcattgccagcggctgtagcccagcgaatccagcacaatgacctgctgcaacagccgtttttcgctcaatactgccgctaagatccacagcagaaatgcgctttctttcactgcaagggtgaggcccagaccgatgccaaatcggtccattggcggagtgaaatacgggaaatagtcatatagcagccctccgtcagcaaagagcagcagggcgctggtggcaaaagccacatggggaatggcgagcagccacggcagacgggcgcacatacgctgccatttcggcccaggccatagcgccacaatcaccagcagggcaatcaacaatgccccgaccgccgcgatggttgtcgataccagcgttgccagtaatgcatgcggtaactgtggatcggcaaataacgcctgccagtgtgtcaacgacaacgcaggcgatatcagcgtgagagctgccgggatcagcggtgcataaatcaccgccaccatcgcccacagcaaaaagattaatgcgtaccgtaacggcgtaaccattcttgttccagtgcattcacccatcctgcgtgcggttcagccagtaccggcggcagatcctgcggcattcttgattgcaatatttcgcgctgcccgtcaggcagtttttgcggatcgagaacagaaggatcgccccagacaacgggatctgctttacgcagttgcgcatcgggtgagagcaggaaattggcaactaccttcgccgcagcactggcattcgcgttggctggaatggtgacgaaatgcacgttgccaatcatcccctcgcgaaagccaaaactgtaactgcttgccggcaaatcgccgctggcgattttttgctgcgcatgcgcggggttaaaggtcagcgacaggcgcaatgtgccggctttcagcagagcatccatccgcgcgggcgaaggcgggaaatcctttccttcgcgccacaaatacggatgcagtgcatcaagatattgccacaagggcgcagtgacacgggcgaaagtcgcatcgtccggcgcttcttttaatgcggcgggatctggcgtcagcataatcagcaactgttcaagaaacgccgtgccggtaaagtccggtgggcgcggataagtaaccgtgccgggattggctttagcaaactccagtaaggcttgcggcgtttgtggtggctgtggcgtaacatcgcggcgggcgataaacgtcagttgtgcgccgccccagggcgattccgcaccttgtgtcggcactgaaaaatcttcccgcaccggcagctgtgtgtcgacatagcgccagttgggcagagtctccgcccagcccgtttgtaataaattggcctcttttaaggtgcggaagttttcgccgttcacccagagcagatccaccgagccgcccgttttacgaccggcagcagcttcggtctgaatgcgcttcaccgcgtctgcggcatccgcgagacgaacaatcttcaggtttatagcgtaatgggttttcatctcgccgctaacccagtcgagatagcggttaattgcggtatcgccgccccaggcgttaaaccagacggtttgccctttggcctcatttttaatttcctgccagtcactggcatgtgttgccaaagaaaacagcgataacaatcccagcaaccacccacaatggcgcatcttctctccttaagaacgtttttccggaatacggcacagcccctgagcgggaatgtccatggcagaattaaaacgagccgacaggttttgcaggccgatcaatgccgtcagttcggtgagcgcctgagcgtcaaaatgcgcagccagtcgggtacgcagggcatcatcgactgttggcggtgtgacgcttgcggcttcggcgtactccagcgccagccgttcttcatcgctaaagagcgggctttgccgccagtcagccactgccagcagtttatcgctgctgccggtacgctcggcgactttcatactggtgatatccacacaaaactcacacaggcacatttgcgcaatgcgcgcgctgacaagcgatcgcactaccggatcgagcggtgagcgtttgcgctccagccacccaacaaacattgacaccaaataaaagataaacgggatccgcccccaccagcgaatcgggcttagcacctcgccgtaatggcgacgatgcagccacgcctgcggacgtaaaatgaaaggaattttgctaagcggcggtaaacccatcagtcattcctcttctggcgctcaagccatattttcttcgccataaaaatcaccacggtcagggcaaacagaataaacagtccggtgacaaaccagaaagtaccgcctgttaacatgctgcccgcccaggaataaacaatagtcgtcggtaattgaccaagcccggtggcgataaaaaacgagcgaaaacgtattgaagtcagatcggcagcatagctgattggatcgaaagggacaaaaggcaataaccgacagaccaggatggtgtgtttgccgtagcgagtgaaaaagccgtccatactgtcaagcacggttttgccggttaatttttccaccacttcgcggcccatcactctggcgataaaaaagcacagcgccgcgccggccatcgaactggtccacgacagcaagccgccccagaacgcgccaaacagcgacgcattggcaaaggtgatcaaaaacgcaggtagcggtgcagcaatggcctgtaaaatcatcaacaagaacgagacaactgccgccagtgcgccgtaagactgaataaagcgttctataccctgttggtccacggcggcaaacgccgcaacgctgcgattgataaactcatggacgccgggaagcagcgcccatgcgagcagcatagcgaacaacaggatgatgagggttatacggtagtaccagattttacgcgattgcatcttcatcatcctttatcctggctttattcggtgattttaaaggtaaccgttgccagcgtgttatccgccgggagaactgaggcattgcctttgaatttcacttcgccgcgtttttccaccgcaccataagtgtatgttgcattgctgacgatgccgaccgggcagctatccagacacaccaggcaacccgttttcttctcttctgctgccgttaaattaccgccaaagcgcatgtccagtttcttgccattactgtcaacaatcacttcatcgaaggaatacgcttttgccgccccttgccagttgaccgaaatatccagtttgctgcctgtgacatgagtcgtttctttattatccatcgtcatgttttcgcccggcgtaccacctgcctctttcagggcttcataaaatgctttcggggtcgcataagccataaacagcgatttatgtccgttggagccatctttaaacacaataccgtgacgagtgtcgtcggtgaggaaacgaccattaatttgcaccaacatggttaccgtatggttattggcatcgacgcgcagcggttggctgttcgaaagtccgtcgtattccacttttgccgccgcattctctttttgatcgcagccgctaagcccggcaacagccagtaagcagagtgcagccagtccttttttccatgacactgaataatgttgcgacatcgttctatccttcattttttgggtgagtaagcgggctgcggcgcgaagcagacagatccacatgtttgtgtcgggcgtagagttttgcgagctggacgagaataaacagcgccaggcccgccagacagagttgtaaaataaagcgcagcgtaatgccttcattggcgagatcgcttgccatcacggtataaataacaataccgggcagggtcgtgagtgccgaaataagggtataaggccagaaggcgatggtggttaatccgtaagcgtaattttgaatattgtaaggaaacaacgggattaagcgggtcagaataagaaaatcaataccgttacgcgcaatgcctttttcaatggcctggaaggtatggctatggcccacgtatttcagcagtaaatcacgtcccagccaccgcgccagcaggaatgagcacgaggaggccagcgtggcggcaattaatgagagtagtgtccctaagagcgggccaaaaactattcctccagcgatcaccagtatgcttcctggtaacacaaagagggtggcaatgatgaataacagaatatagaggctataaccgaacaatccgctctggcgaatgagtgtctgtaagtggggtaaatcggtgagcagatcgaataaaccgaaagcgtggatagcgtaaatgaccagcgcaaaaataagacaggcgaaaagaaatttacgctcagcattcatcgtggagtttcctatatcaaacttgataatagagaagtggtcagacaactaaaaacgcagtgacggtataacaaaggacggcaggcaacaaatcattactgacagtttgttgatttttctcaaggttaattctcctgacccagtttgagccaggagagctgctaaattagcggcggaaggtcgcccagacgggggcgtgatcggacggtttttccatgctgcgaatttcatagtcgatgccggtttctacgcaacattctgccagcggttggctggcgagcagcaggtcgatgcgcagaccacggttatcgtcaaaaccttttgagcggtaatcaaaccatgagaaacgatctgctgtttgcggattagcatggcggaaggtatcgaccaacccccagctcatcagcctgtccatccattcgcgctcttccggcaggaaagagcatttaccggtacgcagccagcgcttacggttttcttcgccaatgccgatatccagatctgtagggctgatattcatatcgcccataatcagtaccggattatcacgtttgagttcggtttccaggtagttttgcagattctgataaaactgcgcttttgccgggaattttatcggatggtcgcggctttcaccctgcgggaagtaaccgttgatcacggtgacattacccagcagtgaggggatttccgccataataatccgccgctgcgcctcttcgtcgtcaccgggaaagccgcgacgcacggcaatcggcgtctctttggtcagcagcgccacgccataatggcctttctgcccgtgataaaacacgttgtagccgagcttcgccacctcttcgagcggaaacatatcgtcatgaacttttgtctcctgcaggccaatcacatccggttggtgcttttcgacgatggcttcaagctggtgaggtctggcgcgcaggccgttgatattaaaagagacaaatttcatagtcgctgccatttattcagataaagagtgcgtggatggtagcagaatttcgcgttgcttaccgcctgttgttaagtgatttgatcgatggttgttaatgatgtcaacgatggcgcaaaaaatgcccgcttttggtgcgcgctgcgtcagaatggcgcagtaatttccagtaaatttcgtcaatgatcacaattccagaattatattttacttctgcataacattgcgttttttattctttttattcacccacatcgcaaacgtattcactttatatgcactttaaatgcatatggtttggttataactccttgatttccagttagcctccgccgtttatgcacttttatcactggctggcacgaaccctgcaatctacatttacagcgcaaacattacttattgttaacatatagatagcgaattatttactgtagaggtcgctatgtctcagccaattacgcgtgaaaactttgatgaatggatgatacctgtttacgctccggcaccctttataccggtacgtggcgaaggttcgcgcttgtgggatcagcaggggaaagagtatatcgacttcgcgggtggcattgcggtgaacgcgctgggccatgcgcatccggaactgcgtgaagcgctgaacgaacaggcgagtaagttctggcataccggcaacggttacaccaacgagccggtactgcgactggcgaaaaaattgatcgacgccacgtttgccgatcgcgtcttcttttgtaactccggtgcggaagccaacgaagcggcgctaaaactggcgcgtaaattcgctcacgaccgctacggcagccataagagcggtatcgtggcgtttaaaaatgcgtttcatggtcgcacgctgtttactgtcagtgcgggtgggcagccagcctattcacaggattttgcgccactgccaccagatatccgtcatgctgcatataacgatattaactctgccagcgcgctgattgacgacgccacctgtgcggtgattgtcgaacccatccagggggaaggcggtgtggtgccagccagcaacgcgtttttacaaggtctgcgtgaattgtgtgaccgccacaatgcgctgttgatttttgatgaagtacaaaccggcgtcgggcgcaccggggaactgtatgcctatatgcactacggcgtgacacctgatctgttaactaccgccaaagcgctgggcggcggtttcccggtcggtgcgttgttaacaaccgaagagtgcgccagcgtgatgaccgttggcactcatggcaccacctatggcggcaatccgctggcctcggcggtggcgggcaaagtgctggagctcatcaacacaccagagatgcttaatggcgttaaacagcgtcacgactggtttgttgagcgtcttaataccattaatcaccgctacggtttgttcagtgaagttcgcggcttaggtttgttgattggctgtgtactgaatgccgattacgccggacaagcgaaacagatctctcaggaggcggcgaaagcaggcgttatggtactgattgcgggtggcaacgtggtgcgttttgcgcctgcgctcaatgtcagcgaagaagaggtgacgaccggactggatcgctttgcagctgcttgcgaacactttgttagccgaggttcatcatgatggtcatccgtcccgttgagcgctcagatgtctcggcgctgatgcagcttgccagcaaaacgggcggcggcctgacgtcgcttcccgccaatgaagccacgctttccgcgcgtatcgaaagggcaatcaaaacctggcaaggcgaactgcccaaaagcgagcagggctatgtgttcgtgctggaagatagcgagacaggcaccgtggcggggatttgcgccattgaggtggcggttgggctgaacgatccctggtacaactatcgggtcggcacgttggttcacgcctcaaaagagctgaatgtctataacgcattgccgacgctgtttcttagtaacgatcacaccggcagcagcgagctgtgcacgctgtttctcgacccggactggcgcaaagagggcaacggctatttgctgtcgaaatcgcgctttatgtttatggcggcttttcgcgacaagtttaatgacaaagtggttgctgaaatgcgcggggtgattgacgaacacggctattcaccgttctggcaaagcctcggtaaacgcttcttttcgatggattttagccgcgtcgattttctctgcggcaccgggcaaaaggcatttattgcagaactgatgccgaaacatccgatctatacccactttttatcccaggaagcccaggacgtcatcggtcaggtacatccgcaaaccgcgcctgcccgcgcggtgctggagaaagaaggttttcgttaccgcaactatatcgacatcttcgacggcgggccaacgcttgagtgtgacatcgaccgcgtgcgcgccatccgtaaaagtcggctggtggaagtggcagaagggcagcctgcgcagggcgattttccggcctgcctggtcgccaatgaaaattatcaccatttccgcgtggtgctggcgcgtaccgatccggcaaccgagcgtttgattttaaccgccgcacaactggatgccctcaaatgccacgcaggggatcgcgttcgtctggtgcgcctgtgcgcagaggagaaaacagcatgactttatggattaacggtgactggataacgggccagggcgcatcgcgtgtgaagcgtaatccggtatcgggcgaggtgttatggcaaggcaatgatgccgatgccgctcaggtcgaacaggcttgtcgggcagcccgtgcggcgtttccgcgctgggcgcggctctcattggctgaacgtcaggtcgttgtcgaacgctttgccggattgctggaaagcaataaagccgaattaaccgcgattattgccagagaaacgggtaagccgcgctgggaagcggcaaccgaagtgacggcgatgatcaataaaatcgcgatatcaattaaggcgtatcacgttcgtaccggcgagcagcgtagtgaaatgccggacggtgcggcgagcctgcgacatcgcccgcacggcgtgctggcggtgtttgggccgtataatttccctggtcatttgccgaacggacatatcgttccggcattgctggcaggtaacaccattatctttaaacccagcgaactgacaccgtggagtggcgaagcggtaatgcgtttatggcagcaggctggcttgccgccgggcgtgctgaacctggtgcagggcgggcgtgaaacgggtcaggcgctgagtgcgctggaggatctcgacggtttgctgtttaccggtagcgccaataccggctaccagctgcatcgccagctctccggtcagccggagaaaattctcgcccttgagatgggcggtaataatccgctaattatcgatgaggtggcggatatcgactcggctgtccatctgaccattcagtcggcgtttgtcacagccgggcaacgctgcacctgcgcccgccgtttattgctcaaaagcggagcacagggcgatgcgtttcttgctcgtctggttgccgtcagccagcgattaacgccgggcaactgggatgacgaaccgcagccgtttattggcgggctgatttctgaacaggccgcacagcaggtggttactgcctagcagcaactggaagcgatgggcggacgaaccctgcttgcgccgcgcttattacaatcagagacatcgttgctgacgccggggatcattgaaatgacaggcgttgctggcgtaccagatgaagaggtgttcggaccgttattgcgcgtctggcgttatgattctttcgaggaagcgattctaatggcgaataacactcgcttcggactctcttgcggtctggtttcccccgagcgggaaaaattcgatcaactgttgctggaggcgcgggtggggattgttaactggaacaaaccgcttactggtgctgccagtaccgcgccattcggcggcattggtgcatccggtaaccatcgccccagcgcctggtatgccgcagattactgcgcatggcctatggcgagcctggagtcggactcgttaactttgcccgcaacgcttaaccccgggctggatttttccgatgaggtggtgcgatgaacgcctgggaagttaatttcgacgggctggtagggctgacgcatcattacgctggcctgtcgtttggtaatgaagcctctacccgtcaccgttttcaggtgtctaacccgcgactggcggcgaaacagggcttactgaaaatgaaaacccttgccgatgcgggattcccccaggccgtgatcccgccgcacgagcgtccgtttattccggtgctgcgtcagttgggattcagtggtagcgatgagcaggtactggaaaaagttgcacgccaggcaccgcactggctttccagcgtcagctccgcttcgccaatgtgggtagccaatgcggcaacgatcgcgccatctgccgatacgctggatggcaaagtgcatctcaccgttgccaacctgaacaataaatttcaccgttcgctggaagcgcccgtcactgaatcgctgttaaaagctatttttaacgacgaagagaaatttagcgtccattcggcgttgccgcaggtagcgttgctcggtgatgagggggcggcaaaccacaatcgtctcggcggtcattacggtgagccgggtatgcaactttttgtctacgggcgagaagaaggcaatgatacccggccttcccgttatccggcgcgacagactcgcgaagccagcgaggcggtggcaaggcttaatcaggtgaatccccaacaggtgattttcgcccagcaaaacccggacgttatcgaccagggtgtttttcataatgacgtgattgccgtaagtaaccgccaggtgctgttttgccaccaacaggcgttcgctcgccagtcacagttactggcaaacctgcgggcgcgggtgaacggttttatggcgatagaagttccggcaactcaggtttccgtgtcggatgcggtgtctacctatctgtttaacagccaactgttgagccgcgatgatggttccatgatgttggtgctgcctcaggagtgtcgggaacacgccggagtatggggttatctcaatgaactccttgccgctgacaacccgattagcgaactaaaagtctttgatttacgtgaaagcatggcgaatggcggcggcccggcgtgcctgcggttgcgggtagtattgacagaagaagaacgccgggcggtgaatccggcggtgatgatgaacgatacgctgtttaatgcgctcaatgactgggtggatcgttactaccgcgatcgccttactgctgccgatctggccgacccgcaattgctgcgcgaagggcgggaagcactggatgtattgagccaattactgaatctcggttcggtttatccgttccagcgcgagggagggggcaatggataattttcttgctctgaccttaacgggtaaaaaaccggttatcaccgagcgagaaatcaacggcgttcgctggcgctggctgggcgatggtgtgctggaactgacgccattaacgccaccgcaaggcgcgctggtgatttctgcggggatccacggtaatgagacggcacctgtggaaatgctggacgcgttgcttggcgcgatatctcacggcgagatcccgttacgttggcggttgctggtgatcctcggggatcctcctgcgctgaagcaagggaaacgttattgccatagcgatatgaaccgaatgtttggcggtcgttggcagctatttgctgaaagcggagaaacctgtcgggcgcgcgaactggaacagtgcctggaagatttttatgaccagggcaaagaatctgtgcgttggcaccttgatctacataccgcaattcgtggctccttgcatcctcagttcggtgtattaccgcaacgcgacattccctgggacgagaaatttctgacgtggctgggtgcggcggggctggaggcgctggtgttccatcaggagcctggtggtacgtttacccatttcagcgccagacattttggcgcgctggcctgtacgctggaacttggcaaagcgttgccctttgggcaaaacgatcttcgccagtttgcagtaactgccagcgcaattgctgcgctgctatctggtgagagtgtcggtatcgtgagaacaccgccgctccgttatcgggtggtttcgcaaattactcgccactcgccgtccttcgaaatgcatatggcaagtgacacgctgaattttatgccgtttgagaaaggaacattgctggcgcaggacggagaggaacgttttaccgtaacccatgatgtagagtatgtgttattccctaatccgttggtagcgttgggattacgcgcgggattaatgctcgaaaaaataagctaatacttacccgcagaaatcattctgcgggtattaagttgctttcttataaattaatacagattaatcctggttatttgctttatttatcaccagtcatccggtatagttcttcataatctctgcaaaatcattgtgttgtaatattctctcatcactctccatcaaattttctttttttctccataattggcgcaaaagtgttttttacactttcattgttttaccgttgctctgattaattgacgctaaagtcagtaaagttaatctcgtcaacacggcacgctacttaagaaagccgtaataaataactgaaaggaaggatatagaatatgcgtaaattaactgcactgtttgttgcctctaccctggctcttggcgcggctaacctggcccatgccgcagacaccactaccgcagcaccggctgacgcgaagccgatgatgcaccacaaaggcaagttcggtccgcatcaggacatgatgttcaaagacctgaacctgaccgacgcgcagaaacagcagatccgcgaaatcatgaaaggccagcgtgaccagatgaaacgtccgccgctggaagaacgccgcgcaatgcatgacatcattgccagcgataccttcgataaagcaaaagctgaagcgcagatcgcaaaaatggaagaacagcgcaaagctaacatgctggcgcacatggaaacccagaacaaaatttacaacatcctgacgccggaacagaaaaagcaatttaatgctaattttgagaagcgtctgacagaacgtccagcggcaaggtgatgctgccaacttactgatttagtgtatgatggtgtttttgaggtgctccagtggcttctgtttctatcagctgtccctcctgttcagctactgacggggtggtgcgtaacggcaaaagcactgccggacatcagcgctatctctgctctcactgccgtaaaacatggcaactgcagttcacttacaccgcttctcaacccggtacgcaccagaaaatcattgatatggccatgaatggcgttggatgccgggcaacagcacgcattatgggcgttggcctcaacacgattttacgtcacttaaaaaactcaggccgcagtcggtaacctcgcgcatacagccgggcagtgacgtcatcgtctgcgcggaaatggacgaacagtggggctatgtcggggctaaatcgcgccagcgctggctgttttacgcgtatgacagtctccggaagacggttgttgcgcacgtattcggtgaacgcactatggcgacgctggggcgtcttatgagcctgctgtcaccctttgacgtggtgatatggatgacggatggctggccgctgtatgaatcccgcctgaagggaaagctgcacgtaatcagcaagcgatatacgcagcgaattgagcggcataacctgaatctgaggcagcacctggcacggctgggacggaagtcgctgtcgttctcaaaatcggtggagctgcatgacaaagtcatcgggcattatctgaacataaaacactatcaataagttggagtcattacccagcggcaaaaggtaaaatgcctgcaactgctgaataatctttcagccaaaaaacttaagaccgccggtcttgtccactaccttgcagtaatgcggtggacaggatcggcggttttcttttctcttctcaaacagttgtaaaaaaagcctgatcaccactaacgtaaatcacccgagttgccgataaccatccacggttacctgaacgataacaatgaaaagaacgggccgggagcgagtatggaatactttgatatgcgtaaaatgtcggtgaatctgtggcgaaatgctgccggtgaaacgcgcgaaatttgcactttcccaccggcaaaacgtgatttttactggcgtgccagcattgcatccatcgcggcgaatggggagttttctttgtttcccggcatggaaaggatagtgacgttgctggaaggcggcgagatgctccttgaaagcgcagaccgctttaaccataccttaaaaccgttacagccttttgcctttgcagcggaccaggtggtaaaagcgaaactgacggaagggcagatgtcgatggatttcaacatcatgacacgcctggatgtctgtaaggcgaaagtcagaattgccgaacgtacgtttactacctttggctcacgcggcggggtggtgtttgtgattaacggggcgtggcaactgggcgataaattgctcactaccgaccagggcgcgtgctggttcgatggcaggcacaccctgcggcttttacaaccgcaaggtaaactgttgttcagtgaaatcaactggctcgctggtcattcgccggatcaagttcagtaatttcatagttaccggaaagcagcggcttacaaagaattttataaccgtcgtgatcaaacccggcgggtgtccgaattaacgttgtcgcttcttccagcgaattaaccgcccccagccacagccagttttgaataatatgatattgagtcatttccgggtgctgttctttcagtgccaccgcaccttgccaaggccaacacaccacccgcaaacgctccagagactggcgcaagcgtagcgcatgttcctcatggctctctttaccgcagcatgctccggcgcaacgttttagcgctgaacgaaaacatgcacgaccgcgacttaacggttccagtcccagcaggccataacaaagtttttgttcatcagcgatggtctgcaatgcttgcaaagctgcgcgcctattggcaaacaggccaaacaggttgggggctcgtgaaaaatccacctctttggcatacaccacatcgacgcgcttttcatttaattgcagggcacagagctggcgattgcggcgcaaccgtttattaaacagcggctgttgttctttgattaatcgcgcttcaaggagcagagcgccgatttcgcctgcggtacagatccagctaattcgccgggattgccgtagcatggcggcttcatccggggtgcgtaaatgagaaagcacccgactgcggatattaacgcttttgccgatatagagcggcatggtgtcactttcgccatgaaacagatacacccctggtcgggtgggtaagtcattaaggaatgaacgtaaatgttcgggatattcataaattgccgcagcttcaaattcgagccgcggagaagttaaacgccgtaccactgttgactccgaatgctggttatctatccagtgtaacaggcggggagcgattaaaaaagaggcgggtcgatgacaaaggttacaccgtctgacgtgctacgcctgtcaggcctattcgactcctgcaatatattgaatttgcatagttttgtaggtcgaataaggcgttcacgccgcatccggcgtgaacaaattactctttttcgcacaaaccattatgtgcaaattattactttttccagaaatcatcgaaaacggtaattggcggacggcgtttatgttcggttttcagataccagttctctattgttctggcgacctgttcaggtacgtttttcccttccagatagtcgtcgatattgtcataggtcacgccgagtgccacttcatctggcagagaagggcgatcatcttccagatcggccgttggcgctttcttataaaggtgttccgggcaacctaatgccgccagtaactgtttaccctgacgtttgttgagacgatacagcggattaatgtctgtaccgccgtcaccatatttagtgaagaatccggtaatggcttctgctgcatgatcggtgcccaccacgacaccgctggtcatacccgcaatgctatattgtgctttcatccgctcacgcgctttttcattgccacggacaaaatcgctcagttcaatgtctgcttcccgcaatgcctgttcgctggccaataccgcgcccttgatattaacggttaatacgcgatccggttgaataaaggcaatggcatcctggcaatcttgttcgtcggcctgaacaccatagggcaggcgtacggcaataaattgcagtgattcgttgccggtttccaggcgcagctcattaatcgccatctggcacagctttccggcaagcgtggagtcctgaccgccgctgatcccgagcaccagtgatttaatgaacggataagtttgcaggtagcttttcagaaaatcgatactacgacgaatttcctcttcagcattaatctgcggttttgcgcccagcgcctttattatttgttgttgcaatgtcattgaacccctccagacagaaaagacaaaacttccttaaagctaacccgttgccactgaaacgacaagcgacagcgggctgaatggtggttaaaacgtcatacaggaatcctctgaaagcggagccgtttcgttcgcgggcttgaaaaagcgcccaatgtattccaggcttatctaacacgctgataaacaagaggacggaatatgaacaagaatatggcaggaattctgagtgcagcggcggtattaaccatgctggcgggttgtacggcttatgatcgtactaaagaccagtttgtacagcctgtggtgaaagacgtcaaaaaaggcatgagccgggcgcaggttgcacaaattgcgggtaaaccttcgtctgaagtgagcatgatccatgctcgtggtacttgccagacctacatcctgggtcaacgtgatggtaaagcagaaacctactttgtcgcgttagatgataccggacatgtcatcaactccggttatcagacctgtgctgaatacgacactgatccacaggctgcgaagtaatcaattcgtctgaaagcttgagtaacaacggaaaccggccattgcgccggttttttttggcctgagttcttaattatcttcgcgaattatttgcccgaaatgtgaagagggtcataaccacaggtcaaggagaaacaatttataaggtcaaagaaatactattgctcaggtctataccgtatactcctttcagccacaaaaaaagtcatgttggtttcgcaagttacccagagcatggaagcaggttaaggcttgcggagtgtctggctgacagataatcgtcgatgagggcagttttatggaaaagaaacacatttatctgttttgttctgcgggcatgtctacctctttactggtatcaaaaatgcgcgcacaggcagaaaaatatgaagttccggtcattattgaagcatttccggaaacactggctggtgaaaaaggtcagaatgccgatgtcgtgttattagggccgcagattgcttatatgttgcccgaaatccagcgtttgttacccaacaaaccggttgaagtaattgactcgctgctttatggcaaagtcgatggtttaggcgtgcttaaggctgcggttgcagcgattaaaaaagccgcagcaaattaatttattttaaattttcccgtcaaagagttatttcataaatcaataccgcaatatttaaattgcggtttttaagggtatttttctatgagtaatgttattgcatcgcttgaaaaggtactcctcccttttgcagttaaaataggaaagcagccacacgttaatgcaatcaaaaatggctttattcgcttaatgccgttaacccttgcgggggccatgtttgtattaattaacaacgtttttctaagctttggggagggggcgtttttttattccttaggtattcgcctcgacgcctcaaccattgaaacacttaatggcctgaaaggtattggcggcaacgtatataacggaacattagggataatgtctttaatggcaccgttctttattggcatggcgctggcagaagagcgtaaagtcgatgcgctggcggctgggttgttatccgttgcagcatttatgaccgtcaccccatatagtgtcggtgaggcctatgtggttggcgcaaactggttaggtggagcgaatatcatctccgggattattattggcctggtggtggcagaaatgtttacctttattgtccgccgcaattgggtcattaaattgcccgatagcgtacctgcttcagtatcgcgttccttctcggcattaattcccggctttattattctttccgtgatggggattattgcctgggcgttgaatacctggggcaccaacttccatcagatcattatggataccatctcaaccccactggcatcgttgggtagcgtggtgggctgggcctatgtgatctttgttccactgctctggttcttcggtattcatggcgcgctggcgctgaccgcactggacaacggcattatgacgccgtgggcgctggaaaatatcgcgacctatcagcaatatggttccgtcgaagcggcgctggcagccggtaagaccttccatatctgggccaagccgatgctggactcctttattttccttgggggcagtggtgcgactttaggcctgatcctggctatctttatcgcctctcgccgtgctgattatcgtcaggtggcaaaactggcgctgccgtccggcatcttccagattaacgaaccgattctgtttggtctgccaattatcatgaacccggtgatgtttatcccgtttgtactggtacaaccgattctggcggcaatcaccctcgcagcgtactacatgggcatcattcctccggtgaccaatattgcaccgtggaccatgccaaccggtctgggagccttctttaacaccaacggtagcgtcgccgcattgctggttgcactcttcaaccttggtatcgcaacgttaatttatctgccctttgttgtggtggctaacaaagcacaaaacgcgattgataaagaagagcgcgaagaagatatcgctaacgccctgaaattttaatcgatgccggtacgggtaatcgtgccggtaagaatagagaggaacgatgtatgatggatctcgataacattcccgatacgcaaacggaagctgaagagctggaagaagtggtgatggggcttatcatcaactccggacaagcgcgcagcctggcgtatgcggcactgaaacaggcgaagcagggcgattttgctgcagcaaaagccatgatggatcagtcacggatggcattgaatgaagcgcatctggtacagacgaaactgattgaaggcgatgcgggcgaaggtaagatgaaagtgagtctggtgctggtccacgctcaggatcatttaatgacgtccatgcttgcgcgtgaactgattactgaattaattgagcttcatgaaaaactgaaggcataaggagtcgatgatgcagccagtgattaacgcgccggaaattgccactgcccgagaacagcagttgtttaatggcaaaaacttccatgtgtttatctataacaaaactgagagtatcagcgggctgcatcagcacgactattatgaatttactctggtattaaccgggcgttatttccaggagattaacggtaagcgcgtgttactggaacggggcgattttgtttttattccgttaggttcgcaccatcaaagtttttatgagtttggtgccacgcgtatattgaacgttgggatcagtaaacgcttttttgagcagcattacctgccgttgttgccttattgctttgtcgcttcgcaggtataccggaccaataacgcttttctcacctatgtggaaacagtgatttcttcattgaatttccgcgaaacagggctggaagagtttgttgagatggttactttttatgtcattaaccgtttacgtcattaccgcgaagaacaggtgattgatgatgtaccgcagtggctgaaaagtacggtagaaaagatgcatgataaagagcagtttagtgaatcggcgctggagaatatggtgacgttgtcagccaaatcacaggaatatttgacgcgagcgactcaacgatattatggcaaaacaccaatgcagattattaatgagatccgtattaattttgccaaaaaacaactggaaatgaccaactattccgtgacggatattgcgtttgaggccggttatagtagcccgagtttgtttattaaaacgtttaagaaattaacgtcctttacgcctaagagctatcgtaagaaattgactgaatttaatcagtaagtcgttatacctgacaattcacatatctgtcctgttgctggattatttatgtccgggggggcagatatgccagatatcagtattctgtactgaagggagaaattatgagccagaaattaaaagtcgtcactattggtggcgggagcagctataccccggagttactggaaggatttattaagcgttatcacgaattgccggtcagcgaattatggctggtggatgtcgaagatggtaaagagaaactggatatcatttttgaactctgccaacggatgattgataacgctggcgtcccgatgaagctttataaaacgctggatcgccgcgaagcattgaaagatgctgatttcgttactacccaactgcgcgtaggccaattaccggcgcgcgaactggatgaacgtattccattaagtcatggttatcttggccaggaaaccaacggcgcgggcggtctgtttaaaggtctgcgtaccattccggtgatttttgacatcgtaaaagatgtcgaagaactttgtccgaatgcatgggtgattaacttcactaacccggcgggaatggttactgaagccgtttatcgtcataccggatttaaacgctttatcggcgtgtgtaatattccgatcggcatgaagatgtttattcacgatgttctgatgctgaaagacagcgatgatttatctatcgatttgttcggcctcaaccatatggtgttcattaaggatgtgctggtaaatggcaagtcgcgctttgccgaattgcttgatggtgtggcatccgggcagttaaaagcatctggcgttaaaaatattttcgatctgccatttagcgaaggcttaattcgttctctgaatctgttgccgtgttcttatttgctttattacttcaagcaaaaagagatgctggctattgaaatgggcgaatactacaaaggcggcgcacgagcgcaggtagtacagaaagtcgagaaacaactttttgagctgtataaaaacccggagttgaaagttaagccgaaagaactggaacagcgcggtggggcttattactctgatgcagcgtgcgaagtgatcaacgctatctacaacgacaagcaagctgaacattacgttaatatcccgcatcatgggcatattgataatattccggcagactgggcggtagaaatgacctgtaagctggggcgcgatggcgcgacgccacatccgcgcattacgcatttcgatgataaagtgatggggctgattcacaccattaaaggcttcgagattgctgccagcaacgccgcacttagcggagaatttaacgatgtgttactggcgctaaaccttagtccgttggtgcattccgatcgcgatgctgagctgctggcacgcgagatgattctggcgcacgagaaatggctgccaaattttgccgactgcatcgcagagcttaaaaaagcacattaaccgaggctgattatggaacgcttactgattgttaatgccgatgattttggcttaagcaaaggtcagaactacggcattatcgaggcctgtcgcaatgggattgtcacatcgacgacggcgctggtgaatgggcaggctattgaccatgcggtgcagttgagtcgtgatgaaccgagtctggccatagggatgtactttgtccttactatgggcaagccactgacagctatgccggggttaacccgcgatggtgtgctgggaaaatggatctggcagttggcagaagaagatgctttaccgctggaagaaattactcaggagcttgccagtcagtatttgcgtttcattgagctatttggacgcaaacctacgcatcttgatagccatcatcatgtgcatatgttcccgcagattttcccgattgttgccaggtttgcggctgaagaggggattgcgttgcgcatcgaccgtcagccgctatctaactctggtgatttaccggctaatctgcgcagttctcagggattcagtagcgcgttttatggtgaagagattagcgaggcactgttcctgcaagtgctggatgacgcaagccatcggggtgatcgttcgctggaggtgatgtgtcatccggcgtttatcgataatactatccgtcagagtgcttactgtttcccacgcttaacggagctggatgtgttgacatcagcgtcgttgaaaggtgctatcgctcagcgtggttatcggttggggagttatcgggatgtgtaagtgaggatgtttgccagatgcggcgtgaaccttgcatccggcgattaattcctacaaaggcggcgtaactgcgccgcttgagactgctgacaaacgcaaaactgcctgatgcgcttcgcttatcaggcctacgtgtttcctgcaatatattgaatttgcacagttttgtaggccggataaggcgttcacgccgcatccggcataaacaaagcgcactatgtaaatcatttgaggcggcgcaattgcgccgcctcccatcaggcaggaattttgtcaatcttaggaatgcgtgaccacacgcggtgtgctgccatcagcgttagcagttcatccataaaactaccgtcagcgctgtcagcttccacaatcccttcttcaccctggtcagcgaccttgattgttgctttaaacttgcgcgcgtctcccgccagcgcaatcggtttaaggtgtttgtaggcttccatcaggtagtagttggcatcgccgttgtcagcgatatccgcgatattgccgcaagggacaatgaccgcatcgaccgtcagcgaaggtgcaccggcaaaggtagcggctataggcaacaccgtaccgtcatccgcagtcacttcacccattcgggagtagagcagtttggcatgaacgcctttggccttcagggccttgagaatggccagaaggtctgccgatctcacttcatcattaagtaaaatcgctaccacgcgacctttcacatcaccgtcaggaatggcgtacaaacttaaggatggatcctttttcagaccgttgacgtccggaggtggggtgatattcagctggtcgtcagtcagttcgataccgagatttttcgccaccgcctgggccagagtgagatcaatatgcgccagctggtcaacaacgcgctcacgaatatacggacgaacgactttgcttaactcaaaactgaaaccatcgacaatatggcgctgctcgaatggcgtctgacttagccagaacagacgcggatgggaataatattcgccaaacgatggactgcgctcacgaactttatttccttccacgcgttcctgatatgattcaaaaccgccgcgtttcggtcccggcggtgtttcgcgcggccagttatcgttgatcgagttcggttcgtaattcgccgggttagtgtcgatccccatacgatgcatgccatcacgctggaagttgtggtaagggcaggtcggacggttaatcggaatctcatggaaattcggcccaccaagacgactgatttgtgtatcggtataggagaacaaacgtccctgcaacagcggatcgttggtgaagtccagaccaggaacaatatgacctggatggaatgctgcttgttcgttttcggcaaagaagttatccggattgcgattgagcaccattttgccgacacgctgaacgggcaccagttcttccgggatcagtttggttggatcgagaagatcgaagtcgaacttgaattcatcttcttcaggaatcaactggaagcccagttcgtattccggaaaatcgcctgcttcaatggcttcccacaactcgcggcggtggaagtccgggtcacgtccggtgagtttttgtgcttcatcccaaacgagtgaggctttacctgccagtggtttccagtggaaacgtacaaacgttgccttcccttcggcattaatcaggcggaaggtgtgaataccgaagccttccatggtgcggtaactgcgggggatgccgcgatccgacatcgcccacatcacgttgtgcagagtttcaggttgcagagaaacataatcccagaaagtatcgtgggcactttgcccttgtggaattgcccagtgcggttctggttttaccgcatgaacaaaatcggggaatttatgcgcatcctggataaagaagattggcgtgttattgccaacgaggtcaaaaataccctcttcagtatagaacttggtggcaaaaccacggatatcacgcacggtatctgcagagccagcgccaccctgaacggtagagaacctaacaaatactggggtgattttgttcggatctgagaggaaatccgctttggtgatatcgcttaagcttttatatggctggaaataaccgtgagctgctgatccgcgtgcatgaacaatacgttccgggatgcgctcatggtcaaagtgggtgattttctcgcgcagaataaaatcttccagcagcgttggaccacggttaccggcacgcagtgagttttgatcatcggcgatgcgcacgccctgattagtggtcagcgcataattttcactgcctttgcgtacgtcttccagagaattaagtttttcgttacgtgtatcaggggctttcaggctcccaggggcggtaggttgtgcacctggcggtgttggttcagccgctggacgatgagatccgtcctcaggtgccagtgagtccatccccggtttcgcttcgctggaatcgtgtagtggtgactggtgctgatgtaggttcttttcgttatgttgcgacattgaactcgtctccttaatttattactgaaagggccgctgttttggtcaaaaaactctctaactatagaccaccagccagatcccgcttcggagactattctggaaacggtgttatgaaatacacgcaaagcgggacgtacaggggctaaatcggctaaactacagtttttctaatttttaatatgcgtttagtgaagccagtaatgaagaaaccgctccgccagcaaaaccgccagattattagctatgtcccacgcacggaacccgcgccgccagaacatgcgataaagatggattcgtttcgtgatgtctggatgctgcgtggcaaatatgttgcgtttgtactgatgggagagtcatttctgcgctcaccggcgtttactgtgcctgaatctgcccaacgttgggcaaatcagatccgccaggaaggggaagtgactgagtaaggattacatacttcccggttttgccgggagttacatgacctgaaattctgcatttcgttgctacattcattcaaaccacctgtaacaaaaagctgcctttgacgagctattgctataaataagtgatcttttttctttaattgtttatttattttaaaatggttaagttttgctaatcatgatgagctatttttgatagttcatcctgtggcgtcgctcttaaacttatattgtaagtgacttagatttaaatgagataataattttgttaacaatatggggcgggagatgttttctacaaacttaatacagagtaattatggtgatttaaatattaaaagcctggctttcgactcttttaaagaaaggcttgagtctaccatggcggcactcactttctttatatcaacgggtcaatgtgactgcgatgaaatagcagagtcgaacttcaatcgtatgattgcctatatgtctaacattaactatgatgcctcaaagccaggagctccagcacttagttttgatacgtatctgcaggacaatgttaaatatagagtgataattaataatctttatggcagtgagtttcggataagagatattaatgagaattttgttgggatggattttacctgtgaattccgacccgaaaaaatgacgaatttgatcaatataaaaaataggttggttattcattatttaaggactatatactatgaaaaaaattatatacatcctgccgggagcatttttgctgcgattcaaaaaaaatgagagtctcctaaagtttccttcgataatatcaatgcttaatatcaatcttctttttaatccactaaatcttccgggaatgggaagtggtgtgcttgaagatattatgagtattccagatagttcacttagaaaacgtctcgggtatgaggttttaagcttctcactacaggcacattcattgagccaggaatgtattgataagttggacatttttttcgctgacgatctgtttaaatatgagtcagtatgcatcgccgcgatggaacatttaaaaagtaaagcaacggcccctatacaaaacggaccgttgccagcataagaattaacggtgtgccagttcggcgtcgtcttcgctatccagaatggctttatcggtttgcttcagccactggctggtcagcgtgccagctgtcatcgagccactaacgtttagcgccgtacggcccatgtcgataagcggttcaacggagattaacagcgccaccagggttactggcaggcccatcgcaggcagcacaatcagtgcggcgaaagttgcaccaccaccgacaccggcaacgcctgcggaactaacggtaacaataccgaccagcgtcgcaatccacatcgggtccagcgggttaatgccaaccgtaggcgcaaccatcaccgccagcattgccggatacaaaccggcgcagccgttctgaccaatggttgcaccgaaagaggcggcgaaactggcgatggattcaggaacgcccagacgacgcgtttgtgcttccacattcagtgggatagacgcagcactggaacggctggtaaaggcaaacgtcagcacaggccataccttacggaagtacttcagcggactcacgccattaatgcccagcagaatgccatgcactgcaaacataatcagcagaccgaggtaggacgcgacaacgaaacttcccagtttgatgatgtcttgcaagttagaacctgcaaccactttggtcattagagccagaacgccgtaaggggtcaactgcatgacaaggcgaaccagtttcatcacccagctttgtagggtatcgatagcggctaagacgcgttcacctttcggcgcatcatccttcagcagtttcaatgcagctacgccgaggaatgcggcaaaaattaccacgctgataattgacgtcggattggctccggtaagatcggcaaacgggtttttcgggataaaggacaagaccagctgcggaacgctcagatcagagactttaccaacatagttactttcaatggcgttcagacgtgcagtttctgcaccaccctgaaccagaccttcagccgtcaaaccaaacaggttggtgaccagcacaccgaccagcgccgcaatcagcgtggtaaacaaaagcgtaccgatggtcagaaaactgattttgcctaactgagatgcgttatgcagacgggcaaccgcgctcagaatagaggcgaagactaacggcataacgatcatttgcagcagttgaacatagccgttaccaacgatgttaaaccactgtacagaatctttaagtacctggctgtcagaaccataaatggtatgcagggcaaggccaaaaaccacacccatcaccagacccaccagcacttttttcgccagactccactgtttatggcgggtctgagccagcgcaaacagcagtacaacgaacaccacgatgttcgcaattaatggaaagttcatccccgttctcctgatcttattatttctatcactgcgtagcagtcatagtgttggcgcaagattaacagaactgtgagctggctcttatattcaaatggaattgcttattccagaaaggtgatttttgcctttttagtattcaacctgatgcttaataagccgatgaaactggatctgcaaggtattgatcatttgcgatgaccaacgaacagcgctgttctcgggtaatgaatggggcatccataccgaccagacaaataatgccatgcagataaaacgttccagttggttgcccttttggggaaccaggataggcaagcggaaacgccagcggcatggccagagcaggggaacaccggcgggtgtcagcatatcggcaagtatgtggctcaaataacccagcaccattccttgtagcgcatcagccggaatgaaccagccttccggaaccttaaggtaaaaggttgccagcagcgcaaataccgccagcagactgtgggtaaaaccacgatgcccaaaagcgcgggcgatcggttttgatatccattttaatcgctgcccaagaaacgactttgggtgatcgatgtccggtaacaaacacgtcaggattgcggaagggacaatatgccaccagtcaccctgtgccagcacgggcgtcagctcggcatttttggcaaataccgcacaagcaatagaaaagagaaggtgaccttccgccgtcatgataaaactcactaaactgtcgatacgtacagtataggatttttatacagtgcacggaagtggtgacggtgtaactctttctcttaaattgacgattaatccgtcagttgaatgcaaattcagataaagaaccaggggcagcgtgatcactgcccctggtcattaaccgagaaggtcttttgcggtgagttctgtcagcgatgagagtttgacgtttgctaatacaaaacgtggatcattttgcgcttctggcgcaggaacgacgatggaacgcatgcgggctgctttagaagcgatcatgccatttaccgagtcttccagcgccacgcaggtcagtgggtcaacgcccagttttgctgcgcagtcgagatatacttgcggatgcggcttgctgtaaggcagtttttcagccgaggcgagggcatcgaaactgtcgcgtaagtcaaacatggtcaacactttttccagcatatgtagtggtgacgcggaggccagtcccaccaataaaccttgttctttgcataacgcaacagcttcgcgcacgcctggtaataatggacgtgtctcttcaaccagtgaaatggcacgggcaataacccgttctactacttcctgacggcttggcccattccacggttgccgggcgtaccaaagatcgaccaccatatcgatgcgtaaacctaaggtgtccggcagctcgttacgacgggagatatccacccccaggcttgccatcacatccagttcggctcgatcccataaaggttctgagtcgataagtaatccatccatatcaaaaattgcagcaagaatctgacgcggggttgacattacaacctctcctttagagcattatgtgtaaggtattaagccgtgcttatgattaagcgcctatcatatcgcctttaaagaatgggcgaaaacagatatctacaggtaaactaagtgaaacgacgcgtcttaatcaaggagaactcatgacgtatcaacaagctggacgcattgctgttttgaaaaggattttgggttgggtgatttttatacctgcattgatctccacattgatttctttgctgaaatttatgaatacccggcaggaaaaccaggaaggcattaatgcggtcatgctcgactttactcatgtcatgatcgatatgatgcaggcgaatacgccttttttgaatctgttctggtataactccccgacccctaattttaatggtggcgtgaacgttatgttctgggtgattttcatcctgatttttgtcggactggcgttgcaggattccggtgcccggatgagtcgccaggcgcgcttcttgcgggaaggtgttgaagatcaactcattctggaaaaagccaaaggggaagaggggctaacgcgtgaacaaattgagtcccgtattgttgttccgcaccatactattttcctgcagtttttctcactatatatcctgccggttatttgtattgctgcaggttatgtgttcttttctctgcttgggtttatttaatcaaaaggccgcacggagcggccattatcctcaacccatatcatgctgctaataatctatccaatgactgctgagcaataaccaaatgctgaccgccaaataatcttgcacgatttaacagcgtgtagagttggtaaaccggttgacgttcaaggaaatcggcaggtagcggggatactgactgatagccgtcatagatttgtggcggctgttcagtatgcagcggtaacatcgccaggtcgcactctcggtcaccccagtagcaggcagggtcgaaaatgtacgggccatccggacccagcgcacagttgccggaccataaatcgccgtgcaacagagaaggctgcagttgatgcgaggccagacgctgctgaatatgctcgacgatggcgtcgatattgccgaaagcgatccctttctctgctgccagttccaactgccagccaatccgttgttcagcaaaaaacgttgaccagcgacgttgccaggtgttgggctgtggagttgtggagagcgagttatcaaaatcgaggccaaattgtggttggtcactccattgatgtaaacgcgcaatttgctgaccaagaataaatgcgctatgcgcatccagcggacgaggtgggagataatccatcaccagaaaactgtagtcacggtcagcgcctactgcccaaaccttaggcacggtgacggttttactacgcgacagtaactccagttggtcggcttcggcggtaaaaccgggaagcagttccctttcatcacatttgacgaaaaagtcatgtcctgcatagcgcaaatgccatgcggcatggacttctccgccaggcagttcattacgcagttcgatttcgccttcacctaactgctcgctcaaaagacgactgattgcctgccacatgatgtctctcccatgttgtctgccagatcataaggttagcgcaagaatgcggtgtaaaaacacgagctaacgcacaccacagactgattattgcccaaaaaccatttattttctgttgctattccattcctcccaagtcgtgatggtgatttcaggatctttgccggttgcactttgggtaagccccgaaaccagttctctaatttcttcttcactttgggtactgataagtccaaaagtgttagtccccagctcatggatatttccctcatcatccgtcatggtgagcaaaaaaccgtcgcgagtcaggtaattattcaactcgttaatttcagtcaatgtatcctcatgcaacatgacggttatgacataacggacaagatcgccactggccatagttcacccctttgttatcacatgacttttgagcaaagtcggagaaacgcgttgccgacaggttggtggtgattcccccaatgctgggggaatgtttttgttagcgggaaaggtaagcgtaaattttttgcgtatcgtcatgggagcacagacgtgttccctgattgagtgtggctgcactccccgcagctacgccaaaacggaccatctcttcaagagaggcattttctgccagtttcagtgtcatcgcgccgaccatgctgtcaccagcgccaacggtactctggcttttcaccggtggtggcaccacctgaatgcagttttcactatcaacacccagcgctccttgtggaccaagggaaacgacaacccgtttggccttgccgctattaacgatttcctgcgcggctttgcggacatcgtccggctgggtgagttcgcgattcaccagcgcactgagttctttttggttaggcttaaccaactcgatgttaccaattgccagtgctgcacttaacgcttcgccagaactgtcgacgatgcagcggatcccttgtttttgcgaagcggaaatcagttgggttaatttttccagcttcacacctggcggcaggcttccgcttatgaccaggatggccccggattcaatttccagaacttgctcttcaagctggcgaaactcatcttcatttaatgccgcgcctggcataacaaaacgatactgctcaccgcttgcttccacatgtacatgtaaattctgccgggtccagtctttggcttctacagtagcgacggggacattttcatccgccaacagtgaaaccaggtgttcgccggtcgcgccacccgccgggaagatcgctgtggcactgcctccaagatgggcaatggcgcgggcgacgttgatgccgccgcccccgggttcgaacaccggtgcggtacagcgcagttttccttcgggataaatttgcggggtaattgttgcgctatcgagagagggcgcaagtgtcaacgtatagatacgtaccatcatttcctcctataggctgatttcagtctggcaccgaatcagcggaaagtgaagaaattaacaatatgatttattggagctttatttaaaattttgcagataaatatatataaataaaaatctgttttcgccacatgcttattcaaaaaatgaaataagaatacattgctaagttattcgcgcctttttataattcgttacctttccagggacgctaatctttgatccttaagaaagtttccgggaccgcgatggtctctttttttgttgtacggactcttgataaatgaagcttttgaagacagttcctgccatcgttatgttggcggggggcatgtttgcgtcactgaatgcagctgccgatgattccgtttttactgtcatggacgatcctgccagcgctaaaaaacctttcgaaggtaatctgaacgcaggatatcttgcacaatcaggcaatacgaaaagctcctcacttacggctgacaccaccatgacctggtatggacaaaccactgcctggtcgctgtgggggaacgccagtaatacttcttctaatgatgagcgttcttcagaaaaatatgcggcgggcgggcgtagccgttttaatttaactgattatgactatttatttggtcaggcaagctggctgacagaccgttataacggctatcgagagcgcgatgtgttgaccgcgggttatggtcgccagtttttgaatggcccggtacacagtttccgctttgaattcggcccaggtgtgcgttacgacaaatataccgacaatgccagtgaaacccagccgctgggctatgcctccggggcttatgcatggcagttgactgacaacgctaaatttacgcagggtgtttcggtctttggcgcggaagatacaacgctgaactccgaaagcgcattaaatgttgctattaatgaacattttggactgaaggtggcttacaacgtcacatggaactctgaacctccagagtctgcaccggaacataccgatcgtcggacaaccttatcgctgggctacagcatgtaaaattatctgccggaccgtgttatgcggtctggctgtcttcgtttgtcactgctcagccccaaatcattgctgcccaacgtagcaacaacatagcgccacagattgccagtagcaccaccaccatcttccagtgttttttatcaaagcgtttagtcggcataccagtgtcctgcatatctcttgtgcgtgataacggagtgtaacaaaagggataggcatcaagggattttttgttattacagccgtcgggtggcgttgtgcacatggtcactgtttctgcgttttatgaaaaaaataaaattatgtatcgatatatatcgtaaatagctggttataaatacgtctttatttcatcagcactaaaactcaggctttggctgatgacatttatagcagcataatatgtttctacagttttataatgcttatgatgaatggctatatgaacagctgacatgttgtcatgatttttagcggccaatagtgtaaataactgatgttgactaaaagaatgtttttttgcaaaagcacccagcgtcgatatataagataacacgacgtcttcattacccttgctcatggcgatgtataatgcaggggttccctgtgctgtagctccttttaataaatccatgatgttagctttgctcaacttgtatttaaaggcgatgccattaattttagagaggaaccgtgtgacacacaaagggtgattattttccattgcggcgtataatcctggctcaccatcatgtattttcatggctaaaatactcatcaccatttttttgtttaaaagttcttgtgctattggagtggttaatgcattcagaaagatatcgattatttcatcgaatccatacaacatggagatatagagtccaggtgtttcgttagcacttttagtttgcagtaatttaaccagattatcttcatgaatgatatgattgtataccagtgactgaatttcttgcataaatatttttacgttgtcagtttgtccgttcatcatagccagaaataaagcaggtgtaccaacgctattctgcgcagttattatttcaatgatttctttttcagggagtatgggcaactgtttgaatagtgtaataagctattgagtctggcctgtggccattattaacaacattgccgatggatgtataggggcaaatggcattcgtgtcgtgatacccgctaaaatagcaactggaactccctcaggtaatagaggaagaatagcaattgcacagttgcgaacatacctatcagcccaggtctgagcatcgggagctgaactgatgaacttatcaagcgagagaaagccccgtgctgccctgtgggtgcctctgacggcaacgttggtatcgttcgggtcgtaaacagacacaacataatttaattgtccatacactgactgctttattcgtagccttactgacaaagtatgattgtctatatataaaatcgcggacatatgactgacattgtttgccatcattcgacaaaagaaaatatctaaagcgaagccaaaatccttactcgcgataacgcgactccctgcaggaggatggcgaagtaatgctctgaactccgcgtcccggactaaggggacatgctgctgtatggattcaacggaggagtagtgtttaatcaggttgactttgccttttccatttctcaatgaatcaagggcgtattgcaatgacagatggcgacaaaaaatagcgtcagaaggagattgcgaaaaaaatgcactaccattgagatttactgttggttgtatagttttttctctatggatttttttagacagtttcatacaatggttacgatcttcggcagttaactgttcctgttcaatataatccagtatgcttcgcaaatggttagccttaataggcgtggtttccagaaataagggaatgatttcttttttatagtgtaatgtaatgagtatattttctgcatggatgggtgaagtggcaaagttaatgataaaaagggcagtggaataacaattttgtgaaatttttcgacagtttgcggtaaattcctgagtaacacagtatgacagcatcgaacttaagtcagaggtatcaagtagggtgatgagttggcgcgcaaattgattaataggctctgatgaaggcgttggtatgtcgctatcgatgtgcaatctatgaggagacttataatgggttctgataatgatatcgttttgactcataatctattcgccttatatatgtctggaggttttgaggatgatgattaattattatcgccagaacgaaatgtgcacgaaaaattgctataagaattgtgtcacttttatcattgtgatatgaccacttcgtcattaatctcatgagcgtttaaaatactaccgccaaatcacgcaacgaactttgctggattcagtttatgctgctgtaaatccgctcgcagtaaacctttcagacgcaccgtgatgttatcagtggttctttaagcgttttgctggtgtactcactacaaacgaattgcgaatcgaatcaatgtgaaacggaaaggtacaatctccctttttttagtgttaacatcgttcaaccgggtggaaggtgagaggttaatgtctttcatttgtgtacctgattgcgaaccaatttagcatttgttggctagatggtttcgcaatgaactgttaataaacaaatttttctttgtatgtgatctttcgtgtgggtcaccactgcaaattaaggatataaaatgcctgttataactcttcctgatggcagccaacgccattacgaccacgctgtaagccccatggatgttgcgctggacattggtccaggtctggcgaaagcctgtatcgcagggcgcgttaatggcgaactggttgatgcttgcgatctgattgaaaacgacgcacaactgtcgatcattaccgccaaagacgaagaaggtctggagatcattcgtcactcctgtgcgcacctgttagggcatgcgattaaacaactttggccgcataccaaaatggcaatcggcccggttattgacaacggtttttattacgacgttgatcttgaccgcacgttaacccaggaagatgtcgaagcactcgagaagcggatgcatgagcttgctgagaaaaactacgacgtcattaagaagaaagtcagctggcacgaagcgcgtgaaactttcgccaaccgtggggagagctacaaagtctccattcttgacgaaaacatcgcccatgatgacaagccaggtctgtacttccatgaagaatatgtcgatatgtgccgcggtccgcacgtaccgaacatgcgtttctgccatcatttcaaactaatgaaaacggcaggggcttactggcgtggcgacagcaacaacaaaatgttgcaacgtatttacggtacggcgtgggcagacaaaaaagcacttaacgcttacctgcagcgcctggaagaagccgcgaaacgcgaccaccgtaaaatcggtaaacagctcgacctgtaccatatgcaggaagaagcgccgggtatggtattctggcacaacgacggctggaccatcttccgtgaactggaagtgtttgttcgttctaaactgaaagagtaccagtatcaggaagttaaaggtccgttcatgatggaccgtgtcctgtgggaaaaaaccggtcactgggacaactacaaagatgcaatgttcaccacatcttctgagaaccgtgaatactgcattaagccgatgaactgcccgggtcacgtacaaattttcaaccaggggctgaagtcttatcgcgatctgccgctgcgtatggccgagtttggtagctgccaccgtaacgagccgtcaggttcgctgcatggcctgatgcgcgtgcgtggatttacccaggatgacgcgcatatcttctgtactgaagaacaaattcgcgatgaagttaacggatgtatccgtttagtctatgatatgtacagcacttttggcttcgagaagatcgtcgtcaaactctccactcgtcctgaaaaacgtattggcagcgacgaaatgtgggatcgtgctgaggcggacctggcggttgcgctggaagaaaacaacatcccgtttgaatatcaactgggtgaaggcgctttctacggtccgaaaattgaatttaccctgtatgactgcctcgatcgtgcatggcagtgcggtacagtacagctggacttctccttgccgtctcgtctgagcgcctcctatgtgggcgaagacaacgagcgtaaggtaccggtaatgattcaccgcgcaattctggggtcgatggaacgtttcatcggtatcctgaccgaagaattcgctggtttcttcccgacctggcttgcgccagttcaggttgttatcatgaatattaccgattcacagtctgaatacgttaacgaattgacgcaaaaactatcaaatgcgggcattcgtgttaaagcagacttgagaaatgagaagattggctttaaaatccgcgagcacactttgcgtcgcgtcccatatatgctggtctgtggtgataaagaggtggaatcaggcaaagttgccgttcgcacccgccgtggtaaagacctgggaagcatggacgtaaatgaagtgatcgagaagctgcaacaagagattcgcagccgcagtcttaaacaattggaggaataaggtattaaaggcggaaaacgagttcaaacggcgcgccctaaccgtatcaatggcgaaattcgcgcccaggaagttcgcttaacaggtctggaaggcgagcagcttggtattgtgagtctgagagaagctctggagaaagcagaagaagccggagtagacttagtcgagatcagccctaacgccgagccgccggtttgtcgtataatggattacggcaaattcctctatgaaaagagcaagtcttctaaggaacagaagaaaaagcaaaaagttatccaggttaaggaaattaaattccgtcctggtacagatgaaggcgactatcaggtaaaactccgcagcctgattcgctttctcgaagagggtgataaagccaaaatcacgctgcgtttccgcggtcgtgagatggcgcaccagcaaatcggtatggaagtgcttaatcgcgtgaaagacgatttgcaagaactggcagtggtcgaatccttcccaacgaagatcgaaggccgccagatgatcatggtgctcgctcctaagaagaaacagtaaggccttcaagtagcactgtctgtggagccttcgggcttcacaggctttgttcgcctttgtttcgtttattaacaatgcgaagtggaagttattaaaatgccaaaaattaagaccgtacgcggtgctgctaagcgcttcaaaaaaaccggtaaaggtggttttaagcacaagcacgctaacctgcgtcacattctgaccaaaaaagcgaccaaacgtaaacgtcacctgcgtccgaaagccatggtttccaaaggcgatctgggcctggtaatcgcgtgcctgccgtacgcataagccgttaacgtttttaactttttaattagaatatagatacaggagagcacatatggctcgcgtaaaacgtggtgttattgcacgcgcacgtcacaagaaaattttgaaacaagctaaaggctactacggtgcgcgttctcgcgtataccgcgttgccttccaggctgttatcaaagctggtcagtatgcttaccgtgaccgtcgtcaacgtaagcgtcagttccgtcaactgtggattgcgcgtatcaacgcagcagcacgtcagaacggtatttcttacagcaaattcatcaatggcctgaaaaaagcctctgttgaaatcgaccgtaagatcctggctgatatcgcagtattcgacaaagtagcgttcaccgctctggttgaaaaagcgaaagcagctctggcataagccagttgaaagagggagctagtctccctcttttcgtttcaacgccatcaaaacattgacttttatcgccgtagccttttcaataaaggtcttttgaagagtaccaaaaggtaacgcaagcaatgaatgctgctattttccgcttctttttttactttagcacctgaatccaggaggctagcgcgtgagaagagaaacggaaaacagcgcctgaaagcctcccagtggaggctttttttgtatgcgcgttttgaaaaataaaaagccagtctatcaggcgtaattgtcgcagccagtctggacacggccagcgcggagaaaccggagcgtatttaagtacgtgagaatttcgagcactgcccgggaccaaaatggcaagtaaaatagcctgatgggataggctctaagtccaacgaaccagtgtcaccactgacacaatgaggaaaaccatgtcacatctcgcagaactggttgccagtgcgaaggcggccattagccaggcgtcagatgttgccgcgttagataatgtgcgcgtcgaatatttgggtaaaaaagggcacttaacccttcagatgacgaccctgcgtgagctgccgccagaagagcgtccggcagctggtgcggttatcaacgaagcgaaagagcaggttcagcaggcgctgaatgcgcgtaaagcggaactggaaagcgcagcgctgaatgcgcgtctggcggcggaaacgattgatgtctccctgctaggtcgtcgcattgaaaacggcggtctgcatccggttacccgtaccatcgaccgtatcgaaagtttcttcggtgagcttggctttaccgtggcaaccgggccggaaatcgaagacgattatcataacttcgatgctctgaacattcctggtcaccacccggcgcgcgctgaccacgacactttctggtttgacactacccgcctgctgcgtacccagacctctggcgtacagatccgcaccatgaaagcccagcagccaccgattcgtatcatcgcgcctggccgcgtttatcgtaacgactacgaccagactcacacgccgatgttccatcagatggaaggtctgattgttgataccaacatcagctttaccaacctgaaaggcactctgcacgatttcctgcgtaacttctttgaggaagatttgcagattcgcttccgtccttcctacttcccgttcaccgagccttctgcagaagttgacgtcatgggtaaaaacggtaaatggctggaagtgctgggttgcgggatggtgcatccgaacgtgctgcgtaacgttggcatcgacccggaagtttactctggtttcgccttcgggatggggatggagcgtctgactatgttgcgttacggcgtcaccgacctgcgttcattcttcgaaaacgatctgcgtttcctcaaacagtttaaataaggcaggaatagattatgaaattcagtgaactgtggttacgcgaatgggtgaacccggcgattgatagcgatgcgctggcgaatcaaatcactatggcgggcctggaagttgacggtgtagaaccggttgccggtagcttccacggcgtggtcgttggtgaagtggttgagtgtgcgcagcatccgaacgctgacaaactgcgtgtgacaaaagtgaatgtcggcggcgatcgcctgctggacatcgtctgtggtgcgccaaactgccgtcagggcctgcgtgtggcggtagctaccattggtgctgttctgccgggtgatttcaaaattaaagcggcgaaactgcgtggcgaaccgtctgaagggatgctgtgctccttctctgaactgggaatttctgacgatcacagcggcattatcgaactgcctgcagatgcgccgattggcactgacatccgcgaatacctgaaactcgatgacaacaccatcgaaatcagcgtaacgccaaaccgtgccgactgcttaggtatcattggtgttgcgcgtgacgttgccgtgctgaatcagctgccgctggttgaaccggaaatcgttccggttggtgcgaccatcgacgacacgttgccgattacagtcgaagcgcctgaagcctgcccgcgctatcttggccgtgtggtaaaaggcattaacgttaaagcgccaactccgctgtggatgaaagaaaaactgcgtcgttgcgggatccgttctatcgatgcagttgttgacgtcaccaactatgtactgctcgaactgggccagccgatgcacgctttcgataaagatcgcattgaaggcggcattgtggtgcggatggcaaaagagggcgaaacgctggtgctgcttgatggcactgaagcgaagctgaatgctgacactctggtcatcgccgaccacaacaaggcgctggcgatgggcggcatctttggtggcgaacactctggcgtgaatgacgaaacgcaaaacgtcttgctggaatgcgctttcttcagcccgctgtctatcaccggtcgtgctcgtcgtcatggcctgcatactgatgcgtctcaccgttatgagcgtggcgttgatccggcactgcagcacaaagcgatggaacgtgcgacccgtctgctgatcgacatctgcggtggtgaggctggtccggtaattgatatcaccaacgaagcaacgctgccgaagcgtgcaaccatcactttacgtcgtagcaaactggatcgcctgatcggccatcatattgctgatgaacaggtaactgacattctgcgtcgtctcggctgcgaagtgaccgaaggcaaagacgagtggcaggcagttgcgccgagctggcgtttcgatatggagattgaagaagatctggttgaagaagtcgcgcgtgtttacggctacaacaacatcccggatgagccggtacaggcaagcctgattatgggtactcaccgtgaagctgacctgtcgctcaagcgcgtgaaaacgctgctcaacgacaaaggctatcaggaagtgatcacctacagcttcgttgatccgaaagtgcagcagatgatccatccaggcgttgaagccttactgctgccaagcccgatctctgttgaaatgtcagcaatgcgtctttctctgtggaccggcctgctggcaaccgtggtgtacaaccagaaccgtcagcagaaccgtgtgcgcattttcgaaagcggtctgcgtttcgtaccagatactcaggcaccgttgggcattcgtcaggatctgatgttagccggtgtgatttgcggtaaccgttacgaagagcactggaacctggcaaaagagaccgttgatttctatgatttgaaaggcgatcttgaatccgttctcgacctgaccggtaaactgaatgaggttgagttccgtgcagaagcgaatccggcactgcatccggggcaatccgcagcgatttatctgaaaggggaacgtattggttttgttggagttgttcatcctgaactggaacgtaaactggatcttaacggtcgcactctggtgttcgaactggagtggaacaagctcgcagaccgcgtggtgcctcaggcgcgcgagatttctcgcttcccggcgaaccgtcgtgacatcgcggtggtggtcgcagaaaacgttcccgcagcggatattttatccgaatgtaagaaagttggcgtaaatcaggtagttggcgtaaacttatttgacgtgtaccgcggtaagggtgttgcggaggggtataagagcctcgccataagcctgatcctgcaagataccagccgtacactcgaagaagaggagattgccgctaccgtcgccaaatgtgtagaggcattaaaagagcgattccaggcatcattgagggattgaacctatggcgcttacaaaagctgaaatgtcagaatatctgtttgataagcttgggcttagcaagcgggatgccaaagaactggttgaactgtttttcgaagagatccgtcgcgctctggaaaacggcgaacaggtgaaactctctggttttggtaacttcgatctgcgtgataagaatcaacgcccgggacgtaacccgaaaacgggcgaggatattcccattacagcacggcgcgtggtgaccttcagacccgggcagaagttaaaaagccgggtcgaaaacgcttcgcccaaagacgagtaatctgatctaactaaaaaggccgctctgcggccttttttctttcaataactgattgatttataatatcttatgccgcttcgttccactgtgtgtccacattcagtggagggtgaggggagtaagcccgctacattgcgggctttgtcttatagtcttatcactgtttcaagtcggtgagggcaccaaaaagaaaacccgcagtttttacgctgcgggtttgttgttcatatctgtgagatagggtgccttatccggccttaccctggcaaccgattgacgggggattgctcccccgtcgcggtttccttactgcttacactgtaagaacgccgcaaactccgctccccagaagctcatccgtatttcacacagcgaaccgtgcaacatccagatgatgaggattgccgtcacgcagaacgtgatggtcgtaagcgatttttgcgacatagcacttgctccttttccggagaggcgctaacctttcacttgtcaaggtaatgcggttagggcctcggttaaacagagatgttttccggggcctttccacatctggccttcgggtattccctccgaccatcagccgaaaggcacccgcgcgtaatctatcgcttttttgttactccggcaattctgcctgttaattctgaggtaaaggcaagctcatctgattgtttcccctgtgtgaagctggcagatcatgccacgggatatcttctgaagagtgaacgccggaggcgtgttttgatgtgaatttatggaaagcttccagtgttgagaagcatacgccgcattccagattgttacactggtaatacttttgccgcacggtgtttgaatcattttccggacgactggtgcggatacgggcagatgcgccacaaagcggacaacggaacatagcgacctcccttaacgtagtgcaggggctattctaagttgttctggctcatactccaacagccagtccgtttcgagcgaaaagcggtgatttaactcttgaagaaataggctttgatacgatttatccaaagcctgtaaaagattggaatgttttttatcctgtcatctattttgggaaaagatcaggaaatagttatgcacttatagatttactatagcattgtattatttgagtacaccctcatgttttgatttgtgcgctaatagaacttttctgtcttttcttctgctcttgaatgtatgtctgcaccatttctgttatggttgaaaatgcactatgttcttctatagttatttttaatttaaatgttttaatgaccggattggtaaggttatttgcatcaactctcacctcaattgcaccattcactttctttggtttgttggctgtatatacgaacaacgggaatatttcttctttgacttgatgacgccactcttcgcattccagcgatacaacttgaactggctcatttctcttttctttataataaaaatcgtttttatccctttctgttggagtaagagataacaaaggaccaatttcttttgaaattatactggatagcggtgtttccaaagctcccccagcgtaaggcattctttctgttacgccacatacactacgccattttcctttgggggcggtaggggctgaaggtaggtcaatccttttgctttcagtcagctcttccattatctcccaattaaatccacacagacgaaaatctccttttgctgtaaatgttaccacagcacgttcagcgatagtataacctgtgttttgtaataaaaacgacagcgggtaatttattgccttcggattaatatgagtatgacagtttttcagtatttcttcacactgctttttccaaagtggataatgtttttctttataaagagaaatatcatctgctgatacagggaaatactcctgttgactaaatgacttgatgattttttctagtgattgtggggtagtttgttcattgtcaaagtttgtaaccaatgggaatgcatccgttagttgacaaagcaaattatcaacttcatattcagataaagctgtataataaggaagtacaatatttaattgctcgtcatcggctactttaatgctgaaatcgggcatagactgagtgaattgcttcagcttagcttccagcaatttaatttgtttatccttttcatctggctcagcaggaagcaaccatgaagaaggcactttatagcagattatattatgttttattgctgaaaaacgtggaccgctatcattggtaatgattgccacctccgaatctggatcgtcagcgcaataccctgccgcaataccaacaaaacgatcgtcggcctcctgataatccaattgttcagataactgttcacatggtttcaggcttagatccatggtaagaaaaactcgcggcgagcgttcacgaataacaagagtcatgtcagttgaatcaactacttgattaaataggctagcagccttccttgcttttttggataggcgggaattaccttgccctttctggcggtcaatctcttgctgaatgggccttgtaataatgatacatacttcatcacaagcagtaatctcggaaaaatttacctgcgtcaagtccttgcattgtagaaaaatgtttgagtctgggaataaatacagctttttgttcattcaaacctcaactatgtcaatggtgttagattaatataataatagttatcaattggttatcaaagcatgattcttaccacctggatttgcccctatatttccagacatctgttatcacttaacccattacaagcccgctgccgcagatattcccgtggcgagcgataacccagcgcactatgcggatgccattcgttataatgctcgaacgcctctgcaaggttctttgctgccgttaacccgtctggtttgggcatgatactgatgtagtcacgctttatcgttttcacgaagctctctgctattccgttactctccggactccgcaccgccgtgttcttcggttcaagtcccaacatccgggcgaactggcgtgtttcattagcccggtagcatgaaccattatccgtcagccactccactggagacgacggaagatcgttgccgaagcggcgttccaccgctcccagcatgacgtcctgtactgtttcactgttgaagccgccggtagtcaccgcccagtgcagtgcctcacgatcacagcagtccagcgcgaacgtgacacgcagtctctctccgttatcacagcagaactcgaacccgtcagagcaccatcgctgattgctttctttcacggccactctgcctgtatgtgcccgtttcgatggcggtacagcaggttttcgctcaagcaacagcgcattctggcgcatgatccggtaaacacgtttggcattgatcgcaggcataccatcaagttctgcctgtctgcgaagcaacgcccatacccgacgataaccatacgtgggcagctctccgataacatggtgtatacggagaagcacatccgtatcatcagtgtgacgactgcggcggccatccatccagtcatcggttcgtctgagaatgacgtgcaactgcgcacgcgacacccggagacaacggctgactaagcttactccccatccccgggcaataagggcgcgtgcgctatccacttttttgcccgtccatattcaacggcttctttgaggagttcattttccatcgttttcttgccgagcaggcgctggagttctttaatctgcttcatggcggcagcaagttcagaggcaggaacaacctgttctccggcggccacagcagtaagacttccttcctggtattgcttacgccagagaaataactggctggctgctacaccatgttgccgggcaacgagggagaccgtcatccccggttcaaagctctgctgaacaattgcgatcttttcctgtgtggtacgccgtctgcgtttctccggccctaagacatcaatcatctgtactccaatgactagtctaaaaactagtattaagactatcacttatttaagtgatactggttgtctggagattcagggggccagtctaccacccctgatgtcaggtaggaaaacaccatatgtttctgctctgtttttccttagaaataggcatccttgctggaacaaagcgagcagctatattgactctatgttgtgagtgtgttgatccgttctgagttaatacatttaagttgctcactctgtttctgctatccattccgggatttttgcctcaagctcaagctgcgtggtaaagccgctgttatcaatggtgtgctcggcttttgcaataatccagtcctgattatcaatctcgcttttaaatcctgttaccgtgccatgcatttcggggtagagttctgcacgtccatgcgccagtgtgatggagaatgatgcggctccgcgttgtagctgctgccactttgccgccgctgcacgtcttgctgcctgctcgttctgataagttttgcgtaacacaaacacgttgccttccgcaccttccatatagtcgccttcccggctgctgcttttctccttttttggttttgacggtttgcggcgtttcacgctgacttttttctttttcccgtaattaagatcaagccagtaagcgcgtacccccgtatacgcttcgcggtcagcaatgcggaactgatggcgatcgccgctgctgcgtgtgatggcgaacgagggcaacggctggccctgtgcgttcacgccaccaccgggcatgatgaataacagattaccgctttttaccgtggtgattgcgcccagcatttccgccatgcgcgtaaggaaggacatgtcgctttcttcggtctggtcggcgtggtcgatttcgatatccatcagcatttcgctgatttgcggtttcagaccataccgatgagcgatggcggataccacacgctcaacggtcacatcatgccaggacacctcacgtttaacgttaaattcagcccgaaaatctgcgcttctggctgaaacagtcagcctgtccggcggtccttcgtgagcgatttcatcaacaatgtaagtgcctttttctgtcagcggttctcccttccagccaatgagaaccgtcaggcgcgcgccccgtggcggtagctgcaactgaccatccgcatcatccagcgtgatggtgagctggtccgcctcaaatccccggttgtcggtcagtgacaggctcatcaggcgctctgccacgcctgacagcgttttaccctccgcgagaatatcaaaatccggcattttcacggggtctgtgccctgactgagcaattgcatggtggtgtcggtcatctgctccctccctgtgtggcatggtcgcatgtgcgtgcggagggggttactgctttttgttgtcgccgtggcgggagaatggcgcaggggtgagattacgcgcgtggtgggtgatgattgttgccgaatcatttaacggatacaaggggttgaagctatgagtgaaactcgttttcatggtgcccgtgttacggaaaataccgacctggtaacagcgattaacgatgttgattccagcgttatcggtatcgtggcaacggcggatgatgcggacgcggagctgttcccgctgaacaagcccacactgctgccccgcgtcaatgacgtgctgggaaaatgcggaacaacggggacgctttatcgtgcgcttaaggccatcgcagaccaggtgagcacaaaggtgatcgtcgttcgcgtggctgaacacaaagaagaagacggaaaaacgcaggatcaactggttatcggtggttctgaatctgacggcagctatacggggatgtatgcgctgcttgttgcagagcaggatgaaagcatcggataccgtccgcgtattctggccgcgccggagctggacacggaggcggtgacaaaatccctgtgcgtgattgcgggtaaactgcgcgcgtttgtgtatgcctcatgtcatgactgtaacacgatggctgaggcaattacctaccgccagaaattcaacgaacgtgaggtgatgctcttatggccggacttcatcgcctacaacccgaaaagtggcaaaaacgaaacgttccccgcgcctgcctatgcgtgcggccttcgtgcgtacattgaccatgagcagggctggcacaaatcgctgtccaacgttccggttaaaaatgtgctggggatgtccaggcatgtgttctggtcgttgcaggccgaagacagtgatgccaacagcctcaacaacaaagaaatcacgaccattattcgtcgcaacgggttccgcttctggggcaaccgcacaccggaaacgaacgcctacatctttgaggtgtatacccgaaccgcacaggtgctggctgattcaattgcggaagcgcagtttgaaaccatcgacagtccactgacgcctgcgaacgtgaaggatgttatcggtgccatcagggcaaaactggattcactggttactgccgggaaactgattggggcgtcgtgctggtatgacgtggtggataacggcaccacgaatttacgtcaggggcgcgtgcgtattcgctacaaatatacgcctgttcccccgctggaagacatggagctttaccagtcgtttactgatgaattctttggtcccgcatttgcggtgctgggaggtgcctgatggctgtaccaaaacatcttcgcttttttacgctgtttgtggatggtgaaaacgaagtgggtaaggtgacgtccgtcactctgcctaagctgacgcgcaaaaccgacagctaccggggtggtggcatgatgggagcggtaagtattgatctcggcctggatgactccgcgcttgatgcgagctttgtcatggggggcgcagttcgtgagctgttccttaagtatggcggcacgattgacggtacgctgctgcgttttgcgggtgaatactacaccgacgctgaaagcgacctgtatgaagtcgaaatgcgcggacgtgtgacggaaattgatatgggggaagccaaacagggcgaagccacatcacacacttacgccattaaaaacacctactacaagctgagtgttaacgatcgcccgttgtgggagattgacctgctgaacttcatttaccggaaggacggcagggacattgtgcccgatcgcatccgttccgcgctcgggcttggctgataagtaatatgcaggcggcgcagtgcgtcgcctctgactgaaaggagtttcctgatgaaagagacgaaaaacatcgataccgaaaacacggtcgttgctgacactgtgaaagaaaccagtgagcgtggcgtaaaacttacccaaccaattgagcgaggcggcgaaaaaatcacgtatgtggagatcaccggggctattgagcaggctggatctctgcgagatttgtcgctgtctgatgtgctgaatttgaaagcggaatccatgtttacgctgctgtcacgcgtgacatcaccgcgactggatgaagtgacgatcaaaaaaatggcatcccgtgactttattcagttatgtgtggttgccgtaaattttttgagcggtgcggactctggcgagaagaacgaacaggcgacggaagcctgatcacggttgtgtgctttgagcacatagaagactttgtggcggatattgccgccatttttaactggtcgcccgccgaaatcttcatgatgacgcccggcgaagtggttagctggcgtgagcgggcggcacttcgcagcgggaatgcagacaatgaagactcttgatatccgggtcgctttcagcgccgttgacaggctgacccggcctgccgaaaacgcccgccgcctgatggggcagtttggtgactccatccagcgaacgcagggggcgatcaaaaatctcgagcgtcaggcgcgttcatttgagcgcgcccgtgacgctgtcagtaaagcggatgcgggcatcgtgaaagcacgacgccagcttaacgcccttaatcagttacaacgcacgggtacagtgctcagcgaaaaacaacaaaagctgatgcagcagttaagcacccggcttgaacgcctgaatgaatcgcgcacacgggaaattcagaaaatgcgggaacttggcggagagctgaaacgccacggcatttccctgacaggcagcgataacaccatccagcaggccatcagacgcaccggacaatacaacaaccagcttgaacgcgaacggcgggcgcttgcgcgtgtaacgcaggcgcgtgagcggtattcacgcgcgcaggaaacagcgggaaaactgaaaacaggtggtgcgctggcaacaggtgcggcggcagcgggcggctatgctgccgggcgttttttgcagcccgctatcgggttcgggaaagagatgtcccgtgttcaggcactgacgcgaatcgataaaaacagcccgcagtttaaggcgctgcgtgagcaggcgttaaaacttggctctgaaacgcagttcaccgcaggcgatgccgccagtggacaggcatttcttgcaatggctggtttcacaccgcaggccattcaggctgcgcttcccggcgtgctgagcatggcaacggctggcggtatggacctcggcgagacggcggatattggttccaatatcctgacgcagttcggcctctctgctgaccagatggaccgggtcggtgacacacttaccgcagcgtttacccgtaccaacactgaccttcgcgcactgggcgaaaccatgaaatatgcaggtccggtggcgggtaagctgggaatatcgctggagcaggccgcagcgatggcgggcgtgctggcgaagatgggtatcagggggagtgatgcaggtacagcgttgcgtaaaagcctggccaatctgtcatcaccgccaaaggcagcggcagaagcactgaaagagctgggggtgtcagttgctgacgccaaaggcaaaatgcgcccgatggagaatgtgctggccgatctctataaagccacccgcaaatacggggaggttgaccgggtatcgttctttaaggacattgccggagaagaggctttcacatcatttatgggcctcgttgatgcggcaggtgacggcttcttagccaaactgagaaaagaacttgaaggcgcgcgcggtgaggcagaacgcacggcaaaggttatggccaataaccttgatggcaacctgaaatcactcggcagtgcatgggaaggtctgcgtattcgcatcagtgatctggttgacggtccgctgcgttctgtcacgcagtggctcacgcgggttgtctcaaaggtgacggcgctggcgcaggcccacccggcactgacgcgccagttactgatagcgggaggcgcactgctggcgacaacagcaacggttggttcgttgtctctggttattggggtgcttcacgggaagctggctacgttgcgtctcggtttttctctcctgaccgaatcaatgaatgttgtcagggttctgcctgcattatggggaatggtgacgggttccgtttctttacttggtggcgctatcggggcgctgttcagtccggttagtcttatcgtggctgcgcttgccggagctgccgttcttatctggaaatactgggatcccatcagggcattttttgccggggtgttcagcgggattatggaaaggctgaccccgttgcgcgaaacctttgaacggtttggccctgtttttgatgtcgtgcgcgatgggattattcaggtctttaactggtttaaatcgctgctgtcaccgatggagtccagcaaggaaacgctggataaatgtgccagtgctggcgagatattcggtaacgttcttggcggtgcgttacaacttgttctgacacctgcaaaaatgctactggatacgctggcgtggatacttgaaaaacttggcgtccttccggatgaagcggaaagggcgcgcaagaaaatcgaagacgcacagcgtgcggccattcttcaggacaaggttgccttgcttcagggggacctggcgaaaatcaatccgccgaagcctgtggaaaatggcaatggcaccggaggtgataaacccaaagacaacaaaccgctcacagacagcaataccgggacgctacgcagactcagcaaaattgctgataacacaggtaagctggttgatgagacgaaaaaacgcattggccccggcgatattgtctttaagaacctgccccgcgcacttgctgttcgtggggagtggcaggagcggaagattgcgcaggtcagtaagcctgcccccgcaattaatatcacacccgtggtcccggctccgctgcctccggcgctggtccctgttgttgcggccagctcccgcccggtggcggaggccatacgctctccagtggcatcagttcctgtaacttcccgtaaccgggagcctgttgcctccggatttggtggtgaaattcatgttcatctgcataacgttgttacgcagaatccccgcgaactggcgaaactggtcggtgaaatggtcagggcagaaatggaacggcgcgcccgtgccgggcgtggcagtttttacgataaagattgaggagtcatggccatgatgatgatctacggcatgtttgtttttgagctgcgtacattgccgcatcagcagttacagcaaaacaaaagctggcggcatgtgaaaaatgaacgcgttaaccgttcggcaagctggcagtatatcggtgcaggtgatgagcgcatcgttctttctggtgtgctttatcctgaaattacaggtggcgaagtgtcgctgtcgctgctgaccacgcaggcgtatacaggacgaccctggcctctgattgatggcgtcgggcagatttacggcatgtatgtcctgaccgaaacgaatacgacccgctccgagtttgatcgctacggtaaggcgaaaaagatagaattttcactgactcttgaacgctgtgatgaggatttgcgggagcgcctgcaatcctcatcgttcagcgatatgctgtccggcttcaaagataaggtaacatcatcccttaacagcgcggccagttcagttaaagggttgttctgatttaacacaaaaaccgctaatggtcagattagcggttattttgtttcctgactcttctctattgttccgattgattctcctgcggggtggtaacgataaatcgtcgatataccaatgccgtaaattattgccagttgttttctgtcgtgcccgtttttgatcagccttgctatttgctcatgctgttcttttgtcagcttcggtcgacgtccgcctgtgcgcccccgtgcgcgtgctgccgccagtccggccagtgtacgttcaacaattaattcacgttccatttcagccagggcacccatcacgtggaagaaaaaacgccccattggagaagatgtatctatgctgtcggtcagactgcgaaaattaattcctcgctcccgtagttccccgacgagagaaatcagatgtttcatgcttcgcccgaggcgatccagtttccagacaaccagcgtgtcacctttttgaaggcgctttaaagcgcgttttaatcccggtcggtctgtctttgtcccgcttaatttatcttcaaatatttgttcacatcctgcacaaacaagagcgtttcgttgcaggtctgtattctggtcatttgttgatacccttacatagccaatcagcacgctgaatctcccgtccaaaagcgcaaatcatgccatgcaggccggaaacggccattatctaaaacctcggtttacaggaaacggtaaatcaggcttctggcgcattacagaaaaaccagaacggcgcagatattccggggaaagataccttcaccaaaaatattggtgcctgccgcgcatatagctcatggctgaatattggtggcgatagtcaggtctggacaaccgcgcaatttatttcgtggctggagagtcagggagcatttaaccatccttactggatgtgcaaaggctcatgggcttatgcaaataataaggtcattacagatacaggttgcggaaatatttgtcttgcaggtgctgtggtggaagttattggcactcgcggcgcaatgaccatacgcgttaccacgccgagcacgtccagcggtggcggaattactaacgctcaattcacttatattaatcatggtgatgcttacgctcctggctggcgacgagactacaacacgaaaaatcaacaacctgcatttgctttagggcaaacaggaagcactgtcggaaatgataaagctgttggctggaactggaatagcggggtctataacgcaaacattggtggcgcatcgacattaatcctccacttcaatatgaatacggggagctgccctgctgtacagttccgcgtgaattacaggaacggcggtattttttatcgttcagcgcgtgatggttatggctttgaagctgactggtcagagttttacaccacaacccgcaaaccctctgcgggagatgttggtgcatatacgcaggcagaatgtaactcaaggtttattacaggtattcgccttggtggtctgttatctgttcagacatggaatggtcccggatggtctgacaggtcaggttatgttgttaccggttccgttaactcaaacagagatgaactaattgatacaactcaggcaaggccaattcagtattgcattaatgggacgtggtataacgcggggagtatttaacgatgatgcacttaaaaaacatttctgctggtaatcctgaaacaaaagagcaataccagctaacgaaacaatttaacatcaaatggctttatacagaggatgggaaaaactggtatgaggaacaaaagaactttcagcctgatacgttgaaaatggtctatgaccacaacggcgttattatttgtattgaaaaggatgtttcagcaattaatccggaaggcgcaagcgtcgttgaggttcctgatattacagcaaatcgccgggctgatatttcaggtaaatggatgttcaaagatggcgtagtgataaagcgaacttataccggggaagagcagaggcaacaagcggaaaatgaaaagcaaagcctgctacagctcgtcagggataaaacccagctatgggactcacagctacggctgggcattatttccgacgagaataaacaaaaattaaccgagtggatgctctatgcgcagaaggtcgaatccacagacacctccagcctgccagtaacgtttcccgaacaaccagaatgaaacaaggcccgatatcgggccttaatttttactcaggcttttgtggccattctggctttgccgtatccacacggctgaccagaacactgtagcgttcccatgcttccagtcgtgtgcgttcctcgtccgtcgccatattcagcctgacagcgcgttccagcggctggatgactgattcagcttcggaaagcaatgcggccttttgtgattcggcctgttgttgctgttcgtcagccgtataaatccgtttaaccacagctccgtccttaaacatccacttaccggaatcatcagcacgacgattagctgtaatatcaggaacctcaacgacgctataaccttcagggttaagcgtggaggcatctttggtgatggcgacaataatattatttgcatcgtaaacaatctttattgtgtctggctgaaagttcttcacttcctcataccagttttttccgtcctcagagtaaagccagatgactccgtgcttctttgttaactcatactgctccactgttttagcattacctgcttttatgttctttaagtgcatcatattaaatactcgccacattataccaagtgccatttatatacttttgcactggcctgtaatgaacgcctgcaatattatcggcagagttttttccggtatcctgtacgttaatccccgtcagtacatagcctgacgggcactgaaaattccatgtttgccagttgttcactccataatattgctgtgaaccaagtcgaacatctttcacatatctggaatcaaaattgccatagttgccgggaataacttgcgagccgcaaagccagttcccgttattatccatgtacgcctgaccatcggtgccattggctgtccttgagttattaatcatgtagatgccaaattgcttatttcccagaccgccaatcataaatttgcggtcggcatggtcctgacggagcaaagcctgagcaccatcagtggataccgcattacgtcccaaaataacattctggtcacgcatatgaatccacatgccggtactactgttaattgcaaaacggtttgcaaatatatcccctgtaacatcaagaccatgccccatgcttatccggccagttctgagattaagcgtaaaggggcgtagtggccctatattaccattttccccttcattctctcgtgtagggatgatatgcaggcattcttcagaacgacgaaaaatggcaccaaaagatgaattaaatatcctcagtgcattgactgtcgatattttcacttcactgctgaaaagggcttcaacaagaacagacaaagcattccatttaagattcatcaggtctttaggccgggtgccaatgatgcggtgtctccatttgaaatattcattgccgttgttgcctgtttcaaaccacatgtaggaatcggtgtctgcatccgaattatttttaaacccaatctttgcccagtcagtatttcgaatccaggcaaggattgagtcgttttcaaaagtaagtccaccggacaacgtatcgccatttttttgcacggcgttaccagccttgtttaccgtttcctgtaaaccgaggtattcgataacggcggcaacggtcgatttcgcaagaatatcccgcccgacttttgtcagggttgccaggctggcgacatcattccccgtaaaatacggaaacctgtctgccgcagtagcaagccccgccagcgccgtcagagtggcatctttcggttgcttacccgcaagcgcgttagtcatggtggtcgcaaaattcgggtcgttgcccagcgccgccgccagctcgttcagtgtgttcagtgcatcaggcgaagagtctacaagtgcggcaatcgcagccataacgaaagccgtgcttgcgatttgggtattattcgttccctgtcgcgcagttggtgttgttggcgttccggtcagtgccgggctgtttaatggggctttcttgttcgtttcatccattactgccttaacggcttttggtgtcgctgccagcgtttcagacgtgctgttggtggcgttgctgagctggacaaggccttttgcggtcagcgaggcgtccgggtgacgtcgtgactgttcatgctctttcagtttgtcatccacgtaattcactgtggccatcaccatggtgttatccacggtaagcgccacagtggcagtgctggatacggtcagaatggtgcgaaatgtttgtgcacgtccggatccttcggcaacggttggcttgtaactttcggcagtattgcctaccgcgatcaaatcgccgtgctcatcaaacacaccaatttcccggatccagaatccgcccgtttcaggaggaataaccagctccgcaataatgtggttctgatgtgttgcgtccagggtgacgcgattaacggtatgtcgccacacctcatgcacaagacgggtctgcttactgtctggcgtgggtaaagtaccgccgccgtcacccacggccatatgtgtcaggcggacaggtttcccatctggcgcggttgcctgcgctaatttttttgcacccgtatcggtgataatggttttaaattttcgtgttgtggtactcatgcttaatcgtccggataaatggtaatgacttcaccgtcgtaagttgctgctgccgcgaaaatatctccctgaatctcctgaatgatattcagccctgtcatgtggcggctgaccgggcgggcatcagcaatcaaccgctccatttccagatacatttcctccgtcacgccactgtccagcgtgccaacatcaatcttgaatgttccgggttcgccgttgaactcccaccactcagacacgcgaatgaggtatcccagcggctcaatggcccgtcgcagggcgctgatggttcctttgtgtcggtgtatcagccatgcatcacgaatcacctgtcgctttgtctcttccggccagttgcgatcccagcggtcaacggaaaacgcccaggcgagataaggcagcagatgcaccgggcaggtgtccggcgaccacagcgtgttgaggtctgccggaatgtctgtaatgcgtgttccgacggcttcggcacaacgcatgaaattgctggctgatggtggtaacagtgaattactcattacgcccaccttcgctgatggtgaatgactcacagcgcgccgcctgtatgtcgctgatggccatattctgtgtgggttcgattatctccacgcgttgcacaccgtgcacatgcagtgcggcagcaatggcggacaacgccacgtcctgaccgataagcccctgctcagccagccacttcctgaacgacgattcagccgcagccagaataggttcggattccggaccggggtaaaagtacagttttgcattcagccgccatgtcacgattctggcactctgtacggtcaggcggtcggccaccgggcgggtatcctctgcattcagaacggcgcgaacggtattaagcaacgcctccgttgctgtgccgtcgccctcagtggacaggatggaaaccgtcacatttgccggagacggactgatggcccgcgcatcgcgcaccagaccgctggcgctgcgggcaaaatactcgtatgcgcctgacgggcctgcaacactcaggccgtcatacgcccgctgcgcccgcagtctcagcgaggtgtcgttctccatcaccacgtcggtggtatccgttgccggagtgataaccaggcgctttgtgttcatattgcccgcgaggttgtccaggtctgttccggcgctgtggctcaacatgcaggcgcgtgcggcctcattgacccgctggcgtaacagcatttcacgaaacgacatggtttgagcgataacgttcaggggttccgattccagttccagtgcggcggagacgacttcacgctgttcggcgggataagctgcaatcatcatggcctttgtgtcagccagaattgcctcaaagtcaggctccgcgatgatggcgggttccggtaactgggaaaggtcaacggcaggcatgatttactccctcagcgtgatggttaattcaacattctgcatggtctgcatgacagtgcccgacagcgtcaccccggcgtggcctcctgccttccagacaacgtcgatggcgttcagggcaatgcgtggttcccatcgtgtcagtgcaatcacggtagcactcatgcattgcagacgcgtggtgttattcatgggttcgtcaatcaaatcaggcacaaggctgccatattcccgtcgcataacccggcttgccagcggggtggtcaggatgtccctgactgactgtttcaggtgcgccatatcgttcaggtttcccgtcccgtccgggttcattcctgtgtagcgggttgtcactgcgggcctcctgtcgaatcgctgccacctttaacgccaccgtgcttatgcgtatgcactgtgatgccgtttgaggtgaaatcgccgccgctgtgcgtgatattgccgctcatcgttcccccttttgtgacgtcaagcgtcgctgttctcagaaggtctgtgcattccacgacaggcgtgttcagtgtcacgctgatggatgcctgcaaagtggccgttttcatgccgcttgcgctcagtgcgcctgcgtccgcgtcgtagcggaacaccgcgccgtccggcgcgctgaccacgatttctttcaggcttttgccgggtgccggaatggcatcactccacaggctgccgattatcatggcggtttccgggttgccgccgatgcaggcaattgccacctgttcgcctggtgatggcggaaaccacacgttgaagtctcccgcgcgcgtggtgttccagcgcagccagcctgtttccagttcgccgctgcgaacgcgcacgcaccaggattcctcatcaacttcagagatgatcccggtgcggatgatattgctcagcagtcgcatgagttctgcgctcatcgtacagcctccgcaatccggcccagcaccgtgttataaatcaggcgctcatctgcctggctgatacccagcagctcacgtaccgggtaatcggtgaaaatgcccggcgcaacctgatcgcgctcaccgaactgatgaacgcgtgcaatacgtgcggccacgccgctgtaacccaccgtcacaccggaagcatctgcacgggctttcaggtagcgggcggtgcgcagttttacgaacatggagacgcgcctggtgctgtcctggttgatgcgccgggtgcgtatttccagaaaacggtcgatgtcatcccggtaaaacgtgcggatattgtttttatcctcatcccacccggtgatggttcgcccgtatttccccgtgtcgtgatgccagtttttcagcgtgcgtgcttcgttattccagataaagcgaatgcgctcctgtatccgggttacgcggcgtctgcgtggtgtccatgcggtcccgtccggcgctttctgtgaccggatacgcgcctgctgggcgcggcgtaaatcctgtgccagctttctggcgatgttattaatggcctgctgattcaggctgtcgcggatagcctcaaaggtttcatccacgcgggtgaatgccttatccatcgctttccccccacgtcacatcctggaatacatgcgaccagtcgccttcggaagagggcaggcggggttttggctccggcaggtgttctgcctgcggtgtgccctgactgctgcgcgtgatgcgaacgcgttcccgcagggggagcgtaaacaggagatcggcgctgtcatcgtcattgataacggcggaaaatttgatgtcctgattacgctccggattgagcaacaactgtggctgattttcggataaccacgccagcagcggcagcgtgaggtcgtccagctctccggcgtaatccatgacaaacatcactatctgatagcggtaaacaaacgatggggtttctccggtcgtttcaatgttgccgctctccacgaaaatggtgaatttttccgggttggcatgacaccaccggcatgaacgggtcatggcttcacgcagggaatcagttttcagcatggttgttgtcctcgttgttcagtcgttgcagcctgcgctgttccagtaattcaatggcccgcttatcggcgttacaggtttccagtgcgtccatgaggctgtcgctccatatcccgatgtttccccatgatggcgtcaccggaaacggcgggggaagtacgggggcggtcagcccttccgggatgaaacggaacgacggcggcggcgcggacgcgttctgcgtgctggtgcaaccgctcagtaaagcgagcgtcaggaacagcgcgggcacatgcatctgtcgtgatatcgttgcgtagctgttcacgtcggatttccccttcctgttgtcggttctggcgcgctgtcatgacgtcacgcagtacaccggatgcggtgctgatgatggtgccggcctctttcagggtccggctgtaatcgtccagttgcgcctgtgtataacggttgtgtccgtcttcctgccccagtctgaatgtctgccagagtgttatggtcagcagcgtgaggacggtcagtgccatcatcaggatgtaacgcactttcatgactggcctccggtgtcacgtaagcaccatgcacgaaaatcagtacgacggttaaccagtccctgtgagcgttcgccgccgctgttcacgaagtcagtcagtctgttgcacatgtcaggccagttgtgcgcctgtgcatgtttccagatagtggtgcggtggtagttacggttcttatccctgaaccacataagatttctgcatccaagattaaaggcggcatctgtcattgcctcaaacgcggactgtggcatggcgttgccgctgaagttctgatttatgcagttttctgcatgttgcatatcattaacccagcgcccggcgacttccgtttcggtgtacagacgattttccacatgcccggtcgagccgcaccccacggtcattaccccggcaatatcccggtaaggcgttgcgcgacagtcctcccatgtggcaatgcggatttgcgcttccgggctggtccggagtttgtgaggggcaatggagaaccccagcgccacaatggcggctacggcgtaacgtttaacgggcagctttatcatgtgtatcgttatcccgcagaatgttcagagcctgacgctcactgtcgtgaagtggccgtgcgtctgactgcgccaggatactggcgatgagttcattgcgacgctgcatggcggtttccatcaggcggcgatgtcgccaggcatgtaatgcagacagagaaccgagtaacaacccggcaagggcgattttttcactgatggtcatcacgcctattgtggtggctgtgactgatgcccagaaggtgatccagtcactcacccgctgaaaaaaacctgttaccatagctgtatcatctctcgttgttttttcttctccggctccggcatttccacctcctgtccggcttccagaaatacctgtcggcagagtccggggttggcatccagcaccttttcggtgacgccctgcgtcgtgccgtagtaccggaaacagagcgaatccacggtgtcgccttccagtgtcttcactttcatcagcacaactccgcaaagattcgcgggcggcacagaatgtcagagatggcccagctcacatcgcgccacaaatccgatgtctgtatatccagtgcgtccgcccggcggtcgcccttgtccgttgtgtccgcatcgcggtaacgctccagaatcagggcgcgtgtggcggtataaacagcattgcgccagtgccagagattgacgctttctccgttaattacaggtgccggaacatcggccagcgtctgatggccagccgcctgctgttcctgctgccatgcttccagctcgcgggtaacgtgtgccacggccccggtggcggtatgcagcaggcgggaggtggtcacgcggcccggcagtcgtaccgccagacgcagctcgcgcagcacaatatccggccagaatgcacccgctgaaatacgggtatcgccatcttcggtgtcggtgatgtcgtcctctgcgggtccgggttcagttctggcaaccatactcatggggttcactcctgaaaaaatcgggcggtgggtgcgcggtgtaaacggtcacggagccaaaccggaacaccgcgcacgccgcccgctgacggggtcagtcgttaaccgcgcttcgccttctgcgtcgcggtggtttttcgtgttgcaggcttccgcgttgtctttttactttcgctgctttcgtcctgcgcctgctgtgcgctggcgtcttctggtgcggctgcggaatcggcttttttcagggcgcgggaaagggttgcaatctcgcgtttcacacctgcgttctggttcagatgcatcgcttcgcgcagcagcttcagtgatgaggccatgctgtccgcatcgctcaggccacggcgggcaaaggcgcacgccttgcataatttggcgcgcacttcgtccggcatatcctggttggcgacaatttcccaaagtgtgtccagtggttcgataaagacggacaaatccgcgtcggcatccgtcccggcctgcgtcagtaccggattgcagatttcttcggtcagcactgtggcagcagtacggccaaagttatccggcatgatgaggttgtgacggaccgcatacgcaccaatacgcagcgcaagcggaagatcgccgcagtcaatcgcccacaccatcagcgtggcaatcacttcgtcctgttgcccgccgtcagcctccagcgttccctcaatccagccggaaaagtccggcaacaacgcttttttgatgtcggctttcgcgcttctggcctgtacgcccttaagccgggcctgtgccagacgcagacgatacagcacctcttcatgcgcggtacgcgcggcgtggtccacaccttcattcgcccggcctgcgcgctgtgccatcacgttctgccagtgttgctgtgcaggagtaatcattttttctctccgttacaggcgggcatgatgcccgccgtgagttgattagctgtcggcgaacttcaggccagtgaccatcgcgcacttgccatagtcttcaacgacataagcgtcattgatggactggtaggtggcgatgcggttgtattccggttcgtctttcatcagacgacgcattgaacctttctgccagtaaatcgacaggttgttgaatgaggtgatcagcatcgttgcatccgggaagaacggtgcaaggaacacacccagcccgccaatggtgcgcgatgacaggatgagctgcccggcaagtaattccgcattgggattctggccgctgatgctgttcagcactggcagacgcagcgagttaaacaggttgcgccccataatcaccacgaggtcgtcagcttccttgtgccattcatccagcagagatgagcgcgcgtcctgtaccagtgcatcagggttcgcgtatttacccgcgtgcgccacggtgttgtccatgttgcgggaagtcagcgtcacgtcattcattacgcgctcgctggcattggttctgatgtgctccagccaccccacgttaacgtcctgaagcagcttgttggtgctgaagttggactcatccgcgtgagatgtgccgttgaaaccgatcatgatgcggtcaagtgccacctgtcgggcaatctgtgcgctgatgcgggactgaaaatcgctgtgtgccgaccaggcatcaagctgcggatacgaaataaacgtgtcgtagttcacctgttcgcactggtatttgcggtttttcagatcaaccacgttattcgggttacggcgttttgttccgtcataactggtatttgtgcgtgcaatcggtcctgtggtgtccaggaggattttttcgcctttctggtcggtcacgccgatcacgttaattttttttgtaagttcggtgctatcctttgaggcgttttcaaaacgttgctgcaccgcaggttccacggtaaatcgcgataccagtgcagaaaccgggatattgttaagcgacgcctgctgcgccatatagcaacccagcttgttgcgggtaatatctgacatcaccagattcataaaaaatttgctcctttgtcttatcagaagtcagccagctggtcggaggctgcgcccgttgcggtgaaccggttctgcggatcgccgtcctgcgtgcgcagtttttccttcagtgctgtcagctccgtggtcagtaaagtgattttctggctgtcctgctgatggcgtgtttccagcgcattaaaacggtcgataatgtcggcctgtgacgttgcgacgctttccaccgcttcctgaatacgggagaaactggcgtcatccgctttgcggccacgaccaataatccccattacgcggttaaaccactgggtgccttcttcctggcgttgttctgccatttcgatgatttcagactcgatggcttcggagataagcggtgcttcaccctggatactgttgaacgtcatcaccgcctgacgttgctgtgccgtgaatttcaggcgctcagtgcccaggcttgccggggtgtcggtcatcgccagcccgaccagataggcgcgcccgttaacggagaactgcgggtgcagttcgatactggaatagattttcttgccgtccgcgacaagctgcttcatgcgctcggtcggttcgatttctgcatacagcgcagtacgtccggccagcggaccttccgtaatgtcttccgtactcagtgcggtgacatcgcccattgcggaaaattcgcttgacgggcatggcgagagatagtgctcaacgttcacgcgggcagcgtaaacatccgggttgaagttctcggcggcttcacgcagatgcaccggactgatttcacggccatcaacagttgatccggagacagccacgcgaaactttttgcgggatgtctttttttcattagccatagtttttgcccctctgactggttcttcagtcatgatggcaaagcgtaacaggctgatacaaagggcttttgttgtaagaaaacggccagaacagggggttaaggagaacggtttcgcgcgcgggtaatcttcctgtaattactcagggggagcaatgattcaggacgcttttgtgcgccagcgtgcgcggcaactttactggcagggttatccgcccgcagaaatatcacgtctgatgggaataaacccgaacacgatttatgcgtggaaaaaacgcgaccagtgggatgaaacgccacccgtgcagcgtgtcacgcagtccatcgatgcgcgcctcatccagcttactgaaaaacagaataaaacaggtggtgactttaaggaaatagacctgctgacccggcagcttaaaaaactgcatgatggccagccggatgcgacggccacaggaaagaaaggccgggcgaaaaaactcaaaaatcatttcacgccggaacagattgccgcactgcgggaaaaaatcatcagcaggctggagtggcatcagcggggctggtttgactccctgacgctttgcagggaagccgggatacgtaacaggatgatcctgaaatcccgacagattggggcgacctggtattttgcacaggaagcactgctgatggcgctgcgtgacgatgtggcacaaccttaccagcgtaaccagatttttttgtctgcgtcgcgtcgtcaggcgttccagtttaaaagcattattcagaaggccgcggctgaagtcgatgtggagctgaaagggggcgataaaatcatcctctccaacggcgcagagatgcattttctcggcacttctgctgcgacggcgcaatcttacacgggcaatttttattttgatgaatttttctgggtcagtcgctttgctgaactgcgcaaggtggctggcgctatggcaaccctcagcggactgcggcgcacctgcttctccacgccatccaccgaaacgcacgaggcatacgcctactggaacggcgaccgctggaacgagaaaaaggccgcgcataaacgccagcgtttttctgtggactggaaaacgctgcataacgggcttatctgccctgaccggacgtggcggcaaattgtcacgctggaagatgtggttaatcacggctggaaacacaccgatattgatgaaattcgtgatgaaaacaccgaagacgagttccgcaatctctatatgtgtgagtttgtccgcgaaggggaatcggcatttaacctgaatatcctgattggctgcggtgttgacggatacgacgactggaaagactggaaaccctttgccccccgcccgatggggaatcgtccggtatggattgggtatgacgcaaacggcagcagtggtaacggcgacagcggcgctgtgtccgtggtggttcctccggctgttcctggtggtcgtttcagaacggtggagacgcgacgcgttcaggggctggaatttgaagagcaggccagagttattgaagagttcacgtatcgctacaacgtggaacacatcggcattgatgcgacgggagggcacggggatgccgtctatcagatagtgaaacggttttttcccgccgccatcccttacaccttcacgctgtcatcaaaacggtcgctggtactgaaaatgctgcaaataatgcgtgccgggcggtgggaatacgatcgcgccgaacgcgagctggttgcggcctttaacgccgtgcgtaaggtgaaaacaccgggcggttttatcacttacgaaacggaccgcgcgagggggatcagccacggcgaccttgcgtgggcaaccatgcttgctgtcattaacgaaccgattggcggcgaaggagaaaacgagcgtttcacggttatggagttctgatgagcagaaaaaataaaaaagtgcgcatgagttcacgcattgatctcgctgatgcgctcaggaaagaatcgtcgctcagtgcattcacatttgatggtccttaccgcctgaccgggcatgacctgctggacaatatgtactgtgctgataacgggcggtggtatgaaaccccggtggactggtacggtctggcaagagctgcccggcaaacgtcctggcatcagtctgcgctttactttaagcgcaatgtattgctcggctgctatattccgcacccgctgctttcccggcaggatttctcggcgctggcgctggactggtttgtgttcggtaacgcattccttgagcttcggagcaatatgctcggcgaaccgcttaaattacggcacgccctggcgaaatacatgcgacgcggaagcgatcttgaatcatggtggtatgtgcaggatggcaaggatgcgtttcagtttcgtcctggcaaagtgtgccacctgatgaatccggatattaaccaggaaatctacggcatgccggaatatcttggcgcattactctcggccagcctttctcattcggcggacatgttcagaaaactgtactacgacaacggatcccacgccgggtgcatcatctacatcggtgcagcgcaggtaaaccgcgaaagcatggactccctgaaagaaacgctacagggggcacgtggtggtggtgcgtttaaaaacgtgctcattcatgcgcccaacgggggcaaagagggggtgcaaattttgccgttccagcagatcaccgcaaaggatgagttcatgaatgttaaggcggcatcccgtgatgatgtgctggctgcgcaccgcgttccgccgcaactgatgggggcgatgccgggcgaaaaaagtgcgtttggtgatgtggagaaggccgcgcgggtttacgcaattaacgagctgatgcccgtcatggaggccatgaagcacatcaatgactggcttggcgaagaggtgatccgctttaacccttacgcactgttagacacccagcccacatcctgacgcgcttcgcttgtctgctgcttcgccggggcataaaaaatttatgccccgactctccagctcctgtatcagtcagataatttcacgacgctttcctgctgattgccatcatcgacagtcagactcttacgcaatcccacctcgttgactgcatattctcgccgtctcagtgcgattttgacggccttacctttcaccccatcaaatcaaaagccctcacgtctttttcacgctcagcgtgagaaatacagccattctgttgtatctctgcgacatcgttcagggaatgctatttaccccctgaaacgcgggctgttcccccgtcacctgcgcgcagaaaaaacgcgtttttttgtgcatgcacggatccttgacggatccagccgccacgcgggccggaagggcaaaaagtcgttcaaaaaaattgtgcaaatttgtgcactattgtgcatttataaaatcaactaaaaaacacctagtgtgacttacctctaccactcgatcggcacgtagtcattaagttccggagaccaattgcacttttcacatctgtgttttccattctggcagatacataaacgataacggccacaatgcgggcacccattttcaccattatcataatcaccgagcgaccattcctgcataagcagctcttcttcatcatcatttagcattaatcccccttgagctatttactcttctcggccctcaaaatcatacgagaaccatcatccagctcccaattaatttcaccgccttctgccatgactagatgccaaacgagttgagcggcctcgttggttacatcgcgaccgcgatcatttcctacgcggcgttttgttccgtctcctaagtcacgcatttttgccaatacgatggtttttgatagcggtgaaaaaccaagctgtagtcgtgctgaattactcactggctgccccctttgtactgtgttaactcttcctgctcctgcatcatgcgattgacctgaacgcgtgtgcgtcgaacggcaaaattaaattgaaacatgagccggaacatttctgatgcttccgtgtgagcatcacggataggtgacaggcggtacagttctgcctccgtagcttgttgaatcaatgacagatcaaattgaagtgcgggtctggtacattttgcacatctggcagcaagctccggtattagtctcttaacgaaggtgttttgcaccgctttgttgatttgtgtctgcatccaaatcgcaaatttcagcgaacgcataagtttgatagcctcgggcagcggcagatagatcatgctggtagatttgggtggttggtgaaccatcttcacggatacgcgatttcgcagcgttcggaaaatcgtgttcccaacaacagcttctacggatacaggacagggagccagaccagcccgcagtgcttctttcattagcatgtattcgtattttttcatcgtgttttcctcgtgcggggcgacagtgcaccccgataaaattaaaagccgtcaaattcgtcattcaggaaataatgcccggatattccctgctatctgactggttatctgtgcggttggtactggctgtggcacggggcgttctgtcctggtttgtgtcaccgataacgcctcatcgtcagcccatgcagccagtcggtaagcctctgctggattcattttcagaagtgccagcccggccagaaaagccacgcgttggccgcttttgcgggcttctggtgtaaggctgcccagccaggcgcatgcttcgctttcgttcttgacggccgcaggcttcagatagaaacttatccgtctggttggtgtcgtcattggtttactccttgtccattgcgtacagcccattaaccagagcaaactgtggcaccccgtccgcgatgaaagtcgcattaactccgcaggcttcgcggatagcgggtgccacaatctccgcccctccaccgacaaccatcacccgcccgtaacccgaaaaacccgccagcgcgcggatcacgcgttgtttcagtgtttcttccttttcacgaataaccgccatcaggctggcgtaatgcgcgtcattgtggatgtgctggcgcagccaggcttcatcatggcgatgttcgataatggtattggcgatgtggtgactggtgcgcataccgttagtggccatcaccgacagtacggcatcggccatcagagaaacgcctacgtgtggatcgcaaaacacctggctgatacctgccagttgcccctgaacctttgccacatccagcgtggttccgcccaaatccacaatcagcagggattcaaacggactcatgtcagccagtgccttaaagccagccggaatggattcaggcataacccgcacgttacggatagtgaatgcttcgccgttctggtactccaccgggcgcataacgttcgcttttttgcggttgatgttggccatgtccggctgtgcgtttgtgtcgaaatactcgctcagtggcagggtgacaaccacatccacctcctgtggcgtgatgcctgatttgaccagcgcgtgatgaatggcaatgacatttacatcgctgtactggtattgcgtgtcggttgtctggacaaagcgatcgctgaccggatcaaaaccatagcgcacgccatcaagcatgtagttcgcgggctgcatgccaccgaacggcgcagaccattccgacttgaagctgttcgggctgatggcgttgcggcgttcgccgttctcagtccatgccagcttgatgttggtggagccgtcgtcgatacaaattttcatgtcgcttttccttatgttgattaattaatcgtttacgggattctgaaatcccgtttttgcctgttttgtgcgcgcttcatatatcgctgcgcgttttttgctcatttacgggattcgtgagtcccgtttctgtctgttttttgtttccactggtcaggccaccccgcagcaggtctgctttgcggcgggcgcgttcagtggtttcactgattctctgtgcgtgctctgcgtcgcggatggcgcgcagcatgtcagaaagcacggtaacgggtgttttcatggtgttctggtcctgctgaagtgtggatgccaggcgtgcggcggcttcagggtctgatgcccccagctgtgtcagatagctggcgaccgggttatggcggatctccgtgctgcttacgccatgattacggctcaggcgctgccagagctgcgtgattcggctgtccgggcgggtatccggtttgcgtacaatttcaaatccctgcggtgcaatgatgctgccgtcaacgtacagactgccgccccgtaacaggtgctgcatctgttgttcaccgatatgcaggccgagagattcagcagactcccgccattctttagcgagtaattcgtggttatcaggcaaaggccgctgctgtttgcggctctgtgtccagctctgcatttcatcactgctgttttttgcctgtttgtcacgaagcgaacgcatcagcgcccggcgttcgtgccgtttcagtgagcgcatccattcatccacatcaacgccgtcagggagctgcggccacggtgctggccgttcttccggctgttctgtcccgttgttgtccgtttcctgtacacggggacagttattgccacgagtccaaggggcggcagggccgccctgaaggtcaaaaccattttcgcgggcgctgtcttccgcttccggtttgcgtcttaccagcttccagttatccggatgcgtgcacacacgggaggattccccgatgagtggtgaccagatcccgtaaatctgtacgctctgttcgccgtaatcgttcagctcatcggcgaggtcgtaggcggtgcgaatcaggtagtctttgcgtggaacaagtacgccgccctgtttctctatgtaggtggcaaaacatccggcatcagcggcggcaagaaccgcatccattgcgtcatccttcagccgttgcgggccttccgggttgcgtgccatctggctggcaaggcggcgcagttcacgccatacctggcgggaggggatgccaaagaactggaactggcggacccggtgaaggcgcgcccagccgatggcgcgttccacgctctcggccattgattttccggtttcgtggtcaacgcgtggcttgcccgttttcgggtcgatgccatccacggcgcggctgtccaggtttttcccgatgtaggtggcgatgtagctggttggcgtgccttttgagccgtctacatactccgccttaaagcgcggagttatgtcatcgcccagctcgtgacgatcttcctgaatggcaatatcgcgggtgtgggacacaatggtgtcgatttcttccggatgagcaaagaccatcatatgccagtgcacggtgccgtcatggtgaggctccgccgtgcggatgccataccagcgcaggccgtcgcggttcagttttttgcggaccgtcgcaaaaaacgtgttaaccaggtaatcgctggagtcgcgcattgtggccccgttccatttgggattcggatgaccgttctccgttgtggcgtggtattttgacgggcaggtgacagtcagaaacaccgctttgtcgccacgggcttcggccagaagttccagccccttcatggtggccatcatttctgccttacggtgaaccgggttacttactcccgcgtaatacaccgtctcgagatcaatcgtgaacccgtcttcattttccagcatgaaacttttcaggaaatcgcgtgttttctcgcgctgtgcgcgaaactcgcttaacgcgtcctggctcagatagggcgatgtttttctggaaaccagacaggcggcgcgaagttgttcttctctccactcgcaacgtaacagccacagtttgcgtttccaccattccgcacaggtcaggcgaaggattgcgcccggcagcagttctgtgtccggttcgtgcctccggtctttgtctgttgtcagtgcgtcataatgcggaggcatggcgtgtaagtgtaacgccatgcgggccagcatctgatacgccttcagcgttacatccatggtcagctcgccatcagtcgcgccaaaaccatcgcagagtttttcgaaggtgctgctgaacatcgccgccgtcatggtggccagcgtctgtatctggtgtttgttgagttgcggcaggtaaagcaaatcgtccaggcgttcacgtccggcaagggagcgataacccggtgtcagccagtgtccgtcagtgcgatccagacgttcgaatattttgcgcagggttccgcgtgcatagcgttccgcctgccagctctttttgcctttccggcgatcggcttcctgttttttgcgcaggaaggagaggtggcgaataagcggatcgcgcagataggacggcagcaggcgcagcgaggccatggcttcatccaccgcgccgcgtgcctgttttctggcgtctcctgccagtgtgatggttttgtcctgtttttcctgtgcgtccaggcttttattaatcaggttgcccagtggcgtggcggagaacgccgcatcagccatttcctggcggcgctcgttctctgcccggtgggcatccagccaggaggaaagcgcggattcaggagcggggatccccgttccttcacgccccactgcgtggcgcggttgttgccagtccctgatgtactctgccgtcatagtgatttacttcgtcatgccattcagggtgtcgcggcagactgtagccagccgctgaatttccagcacggtgtcttctgtgtcggcatggcgatgtgtgatgcggatgctgtcggcaatcacatcgacgattgcagaggatgggcgctggtaaatgccaataacggacggggtgccaccttcaatgcggtaaagcctgtaatttccctcgtggctgtcaatcatgtagcgaccatcaataacaatctttccgtcagcgagctgcggtacaggcagggatttcaggtacatgtcataacgatcacgcacgcgagcggcaagatcacgctctgtgttgagcaggtattcaagaaagtcgttggcgagaatcattgcggcaatcctcttgttacagatgtgcgaaggcctcccgccgcaaggtgcaggaaaggcccggaacaggaattaatggagtttgttttgctgccggatgagctgctgaagcccgacgtggtttccggcagttggaggtgctcatgctctgatttccctcagtagctggttgaacatctgggttagtgggttgctacacccaaacggcatcaggtttacctgataagaaaagcgaccgcctgttttgcgctcttttcttgtgactaaaccgctgcgccagagacggcgtagctccgcattaatggttgtggttggtgtattcagtgctgcggcgatttctccactgctacaacccggattggcagcgatgtagtccagaatggtcatctgcgtgactcctgtacctgtctgataagattcacctgcaccacgttggtggcgcagaagtaagtgccgtcagtgagatagatatgatgtgcatccttttctgaacggtgtttgtcgattgtggtaatcaggcgttcgtcaacttcgtattcacgtcctctggaggtgaaacgaacgacaggaaaatgcttaattgccattacgcctccttggcgtgtgcgaatacctccgcgaatgcggattgttttcacattttcttatttaacctggggtcttatttgcgcggttattcttcagtgaaaaagcgttcaatcttttttactgaattaataattcgcataatcccaatggcgcagaccaccgaaataatcagaacaagccatgaaataaatatactcatgcgatatttcccagcttatacggttcaatatgttccccgcattctgcggcacagatcagctcggaaagttcgttaagtgcatccagatcatcagcgtaaaaagccacgtcatacagacttcggattgctctggtcaatgagtcacgggccgcacgttcagcatgagcgcctgatgcacttaagcgaaaataaaaacgctcaagtgctttgttaatgagagttttatattctttgcccatcacaacgccctttaatctgctttctgtatttcagcttctgaatccatacaaataatttcgatatagggttcatcgccattaacctggcgtgccttttcatcttcgctgatgatttctcgtacggtctggtacggaagttccacaagcagtcgcgtgccgttcagataaacgtaagtggcttcgtcggctccgtttttacccgccggagtcactccgtcaatagcggatgcacgtaataacagttcaccgcgaaaatcaataaaacggataaatacaccttgtgcattgtctttggtcataaagcacctgttataaatcagcctgtttaataaaactttgcccgcgaagcagacgatcaaccgtgcgaagtgcttcgtataatgtgaaatcctgcccgaactgattgtcgccacagctcagtgcaaaaatgcggtttccggtaaacggattgcgtgggcatttgtggatcacgattccagctttctcaatcagccaggcgtgctcgccgatttgttttactgggtagccatccggcgttgcgtgtgtatcactcaggctgtagcggatgttgctgcgtgatgcactggtagtgaaacggttagcgtggcgttctgttccggtacaaaaattacggcgttgcttcagcataaaatgacacctcgttattttgtcatctgcacgtatttctctgcgtttctgatggttttcaggaaaattgcgaagagatttactttgcgttttgtgtttcttccttcttgagtaacgggaattaccgatctatcagcctgccttcttacagcgagaatgctttgatttgtgcgtttcgcataatcctctaggctttcttcaagtaccggtagcccatgttcattacggtatgggtagaacgccgccaaacgctcaaaatccgcttgttcgtatgtgttaaggacttttgccatggtgtgataacctattcaatctggtgctatttgtggctctttgtagcgtcaagtggtactcaactgataaccaatatagtattcaggtgcacaccatgtcaatagagatatcaaagaagctaaaagcaattcgagaatctgaggggcttagtcaggcaaagttcgcggattcaataggtattgcggttggtacggttaagcaatacgagactggtattcgaggtgtgggaacggaggttttactgaaaatcacaatgcacccggaatttaaaaaatacactacgtggttgatgagtaacgaaacaaatgaggctgctgggcagatcagtccttctctctcccctgatgggccagaaaacacatcgtcttctcaaaaatcccgcaagactggcacacagcccggctaatcatggaacgctgggggcatggtggtcttgtaacgctggggcttcacgaatgagcataaaatcaattccgggagggtatcttcttgacatgcgtcctgaggggcgtaaaggcaaacgcattcgcaaaaaatttaaaacgaaatcggatgcagttttatatgagcggtgggtgctggcgcaacagcataacaatgagtggaaaggaaactccattgatcgccgtccgctgtcagtgcttattgacttgtggtggaaataccacggccagctaatgaagtcagggcataacacgcgccttaaattgctgcgcttgagtgaggcaatggatgacccgtgcgtgcataaacttaatacaacgatgctcaccgagctacgtgtgtccaggatagagcaggggatacagcccagcaccataaatcgagagattggggcgttaagcgcgatgtttaccgcactcatctcatccggccattttcttaacgataaccccgttcaaggccttaaaggaatgaaggttaacgagcgtgaaatgggatatctgagtaagtctgaatgtgttcagttgctggatgcactggctgaaaatcccgatgaacggctggccgtcgaaatccttctgtcgaccggggcgcgatggggcgaggtagcggcactggagcagcgccgtgttcttcattgtcgaatcactttttcaaaaacgaagaacagcaaaaaccgtaccgttcctatttctgaaagcctgtttgaaaagatcaaaaaacggggcgggaaactggtgtttccgacgctggattattcattggttcgcgatgtcatcaaaacggtcgcacctgatgttcctgacggccaggctgttcatgcgctgcgccacaccttcgccagtcatttcatgatgaacggcggcaatattctgacgctccagaaaattctggggcacgcaaagattcagacaacgatgatttatgcccatcttgcgccggattacttgcaggatgcggtgaggtttaatcccttgggaggaatgtaactatggaaataaaaaaacctacaaaaaaagagttatatgactatttactatcgaaatatatagaagataaatgcaaagaagaagctgatgaaatcaataagaagtcgatgagtcgtgtcaaaaaacataaagagcggctgatggagattacgccagaaatcttcttccgtttcttgtctgagaagggggtctccagtgtctgcccttcatgtggatcgtcgcgattatctgttccagaaagtatggatctttgctgggataaaaataagaaaccagaaaattttaacaatctacccctggaggaacagagtgagttaattaaagagaacataaagcattatgtatcttatgcttttttgggtgatgttaagagcatacctgatatgcgcaaaacttattacacgctgcattgcctgaattgtggttacctgagcctttatcgtacgtctgcggtgctgaagtggttggagaaagacaaagcgcaggatggtgataatgggtaatgtagcaagaaatcttttcggtaattcagcaggtagtgtgtcgcattctgagcgtgatgtgctttatcatggtggcgatggcggcagtagtggaggcggaatgtcagataaacttgaaaggcgaattgagcggctcgaaggtgatttatcgctaacaagaaacgaccttgcgacgcttgctgaacgcactacaaacctctcaactaaagccgatgttggtgaggtgaaaggtgaactcaaagcagacatagcacatctgaaaggtgatcttgaatgcgatattgcgaatctgaaaggtgagcttaaatctgatacagctaacctgaaagagcagctcaaatcagacattaacagcctgaagggtgagcttaccgaagcgatggataaacgctttgacaagattatggatgagatgaatcggcggtttgacaaggttgatgataatacgaagtggcgttggagtggcattattgtgccagtgtgcacaaccattttcacagcggcggttgctgtatttgttgctaaatttgttggctgatgatccacaaattgaccacatctctgttatttgttgtggttggctgtgtttttgtgtgtctgtaagtctttgataattacctaacttattgatttttgtttgtgtttatggccgctctgcggccttttttcttttcactgtcgaagagtcaccgtaaaatcaacgccatgacacttcagcagaacggataccatgctgacacttgcccgccaacaacagcgacaaaatattcgctggttattatgcctgtcagttttgatgctgctggcgcttctcttaagcctttgcgccggtgaacaatggatttcgccaggtgactggtttactcctcgtggcgaactgttcgtctggcaaattcgcctgccacgtacgctggctgtattgctggttggtgcggcgctggctatatccggcgctgtaatgcaggcgttgtttgaaaatcctctggcagaacctggactacttggcgtctctaacggcgcaggcgtggggcttatcgccgcggtattgcttgggcaagggcaactccccaactgggcgctagggctgtgtgcgattgctggcgcgcttatcatcactttaatactcttacgtttcgcccgtcgtcatctttcgaccagtcggttattgctggctggcgttgcattagggattatctgtagcgcactaatgacgtgggctatctacttttccacctctgttgatttacgtcagctgatgtactggatgatgggcggttttggcggcgtagactggcggcaaagctggctgatgctggcattgatccccgtgttgttgtggatctgttgtcagtccaggccgatgaatatgttagcacttggcgagatctcggcgcggcaactgggtttacccctgtggttctggcgcaatgtgctggtggcagcgaccggctggatggttggcgtcagtgtggcgctggcgggtgctatcggctttattggtctggtgatcccacatattcttcggttgtgtggtttaaccgatcatcgcgtattacttcccggctgcgcgctggcaggggcgagcgcagtgctgctggccgatattgtagcgcgcctggcattagctgccgcagagctgcctattggcgtggtcaccgcaacgttgggtgcgccggtgtttatctggttattgttaaaagcaggacgttagccgcaaaaagacggtctatgattaaaagctaagatttttactgaccacacccaggagaaacgatgcaagattccattctgacgaccgtagtgaaagatatcgacggtgaagtgaccacgctggagaagtacgccggtaatgtgctgttgattgtcaatgtcgcctcaaagtgtggcttaacgccgcaatatgagcagttggagaatattcagaaagcctgggccgatcgaggttttgtggtgctgggattcccgtgcaaccagtttctggaacaagaaccgggcagcgatgaagagattaaaacttactgtaccaccacatggggggtgacgttcccgatgttcagtaagattgaagttaacggcgaaggacgccatccgctgtatcaaaaattgattgccgcagcgccgaccgcagtcgcgccggaagagagcggattctatgcccgtatggtcagcaaaggtcgtgcaccgctgtaccctgatgatattttatggaattttgagaaatttttagttggcagggacggattggtcatccagcgtttttccccggatatgacgccggaagaccccattgtgatggaaagcattaaactggcgttggcaaaataatgtctattgtgatgcagttacaggatgttgcggaatctacccgcctggggccactttctggcgaggttcgggctggggagatcctgcacctggtggggccgaatggcgcgggtaagagtaccttactggcacgaatggccggaatgaccagcggtaagggaagtattcagttcgcggggcaaccactggaagcatggtccgcaacaaaactcgcgctgcatcgcgcctatctttcacaacagcagacgccgccgtttgcaatgccggtctggcactatctgacactgcatcagcacgataaaacgcgtaccgaactactgaatgatgtcgcaggggcgctggctcttgatgacaaactcggacgtagcaccaatcaactttccggcggtgaatggcaacgcgtacgtcttgctgcggtggtgctgcaaatcacaccacaagccaatcccgcaggccaattgctgcttcttgatgagccgatgaacagtcttgatgttgcgcaacaaagtgcgttagacaaaattctgagcgctctgtgtcagcaaggactggcgattgtgatgagcagtcacgatctcaaccacacattgcgtcatgcgcatcgggcgtggttgctaaaaggtggaaaaatgctggccagtggacgcagagaagaggtgctcacgccgccaaatctggcgcaggcctatgggatgaattttcgccgtctggatatcgaaggtcacagaatgctgatttcgaccatctgatttcattagtatcttgaaaatcgggtaattacgacgctaaattaatgcaagaataaaaaacagaggaaccgtacggaatgcgtttctgccttattttgatcacagcactgtttctggccgggtgtagccaccataaagcaccgctgccaaatgccagactttctgattcgattaccgttattgccggtttgaacgaccagctacaaagctggcatggcacgccgtatcgttatggtggcatgacgcggcgcggtgtggactgttcgggatttgtggttgtaacgatgcgcgatcgtttcgatttgcagctgccccgagaaaccaaagaacaagcctctatcggcacgcaaattgataaagacgagttgctgcctggtgacctggtctttttcaaaacgggttccggacaaaatggtttgcatgtaggtatttacgataccaacaaccaatttatccacgcctctaccagcaagggagtgatgcgttcctcacttgataatgtctattggcagaaaaatttctggcaggcgagacgaatctaaatagctgcgcggaatagtagatcactttgagggaacttagcccggattgtgcgatctgatcaatcgccaaatcaaaacaaatcaccaaccggactgagcaatgccgatcatagcaccaatttcccgtgacgaacgacgcctgatgcagaaagccatccataaaacacacgataaaaattatgcccgcagactgactgccatgctgatgctgcaccggggcgaccgtgtcagcgacgttgccagaacgctctgctgcgcccgttcctctgttggacgctggattaactggttcacgcagtcgggtgttgagggactgaaatcattacctgccgggcgtgcccgtcgctggccgtttgagcatatctgcacactgttacgtgagctggtaaaacattctcccggcgactttggctaccagcgttcacgctggagtacagaactgctggcaataaaaatcaatgagataaccggttgccagttaaatgccggaaccgttcgccgctggttgccgtctgcggggattgtgtggcgaagggctgcgccaactctgcgtatccgtgacccgcataaagatgaaaagatggcagcaatccataaagcactggacgaatgcagcgcagagcatccggtcttttatgaagatgaagtggatatccatcttaatcccaaaatcggtgcggactggcaactgcgcggacagcaaaaacgggtggtcacgccgggacagaatgaaaaatattatctggccggagcgctgcacagcgggacaggtaaagtcagctgtgtgggcggcaacagcaaaagttcggcgctgttcatcagcctgctgaagcggcttaaagcgacataccgtcgggcgaaaaccatcacgctgatcgtggacaactacattatccacaaaagccgggaaacacagagctggctgaaggagaacccgaagttcagggtcatttatcagccggtttactcgccatgggtgaatcatgttgaacggctatggcaggcacttcacgacacaataacgcgtaatcatcagtgcagctcaatgtggcaactgttgaaaaaagttcgccattttatggaaaccgtcagcccattccccggaggcaaacatgggctggcaaaagtgtagcggtattaagcgcagctatttagtatgtcgaaaaatggacggcgatgatacatcgccgtccatttactcctgaatacagtagtattttgcagacaaaaattccgtaaatggattattcgtttataatcaggataatctaaaaaaaggacccctgaaaaagtggttaacatggaacaaatgaaagttactccttctgtaattgttatgtcttatggcctcatcccttttagccggatactgaaaaacatccttcgagagggacggttaccatgaagatttttttggagaatctttatcattctgattgctatttcctgccgataagagataaccagcaagtccttgtcggcgttgagttaattacccatttctccagtgaagatggcacggtgcgtatcccgacgagtcgggttatagcgcaacttaccgaggagcaacattggcaattattttcagagcagttggaattactaaaatcatgccaacatttttttattcaacataaactctttgcctggcttaatttaacgccacaagtggctacattattattagagagggataattacgcaggcgaactattaaaatatccgtttattgaactgttgattaatgagaattacccgcatctcaatgaaggaaaagataatcgcggtcttttatccttatcgcaagtgtatccccttgtgttaggtaatttgggagcaggcaatagcacaatgaaagcggtttttgatggtcttttcacccgcgtcatgctggataaaagttttattcagcaacaaatcacgcaccgctccttcgaaccgtttattcgtgcgatccaggcgcaaatttccccttgttgcaattgcatcattgcgggaggcattgatacggcagaaatattggcacagattacccccttcgatttccatgctctccagggatgcctgtggcctgccgttcccataaatcagataacgacgttggttcagcgataacccttctgtttgctggtgtttaagacgagagtaaccgtctacactatcaaacaggaggatctatgaccctgtcttttgttacccgctggcgcgatgaattgccagaaacctatacagcactttcccctacgcctttaaataatgcccggctgatttggcataataccgaactggctaacacgctgagtattccatcgtcgctgtttaaaaatggcgcaggtgtctggggcggcgaagccctactgcctggtatgtcaccactggcgcaggtttacagtggtcatcagttcggcgtctgggcgggccaactgggtgatgggcgcggcattttactcggcgaacaactgcttgctgatggcactacaatggactggcatctgaaaggtgctggcctgacgccttattcgcgaatgggtgatggacgggcggttttacgttcgacgatacgagaaagtctcgccagtgaggcgatgcattatctgggcattccgacgacccgcgcgttaagtatcgtcaccagcgattcgccagtgtatcgggaaacggcggagccaggcgcgatgctgatgcgtgtggcaccaagtcatctgcgctttggtcatttcgaacatttttactaccgccgcgagtcggaaaaggttcgtcagttagctgactttgctattcgtcattactggtcacatcttgaagatgatgaggacaaataccgtctctggtttagcgatgttgtcgcacgtaccgcgtcgttaattgcccaatggcagacggtcggctttgcacatggggtgatgaataccgacaacatgtcgctgctgggactgacgcttgattacgggccgtttggttttcttgatgattacgaacccggttttatttgtaatcactcggatcatcaagggcgttatagttttgataatcaacctgctgtcgcgttgtggaatttacagcgtctggcgcagacattgtcaccatttgttgccgtagatgccctgaatgaggccctggacagctatcagcaggttttgttgacgcattatggacaacggatgcggcagaaactgggcttcatcacggagcaaaaagaggataacgcgctactgaatgaattattcagtctgatggcgcgagagcgcagcgattatacccgcacattccgcatgctgagtctgaccgagcagcacagcacggcgtcaccgctacgtgatgagtttattgatcgtgcggcatttgatggctggtttgcccgttatcgggggcgtttgcaacaagacgaggttagcgatagtgagcgtcagcagttgatgcaaagcgttaaccccgctctggtattgcgcaactggttggcgcaacgggcgattgaagcggcagaaaagggtgatatgacggaattgcaccgcctgcatggggcgttgcgaaatcctttcagcgatagagatgatgactatgtcagtcgtccacctgactggggtaaacggctggaagtcagctgctcgagttaaaggctacttagttaacagcagcttgccagcctgagttttacggagcagatattcttgcccgtcatgatcgataatcagtttgccatccggacctaacagtgtctggctggtaattcgccggatgggctgcggggaagcggccttgtgattggcgtccgtttcaggcgtgagttttctgctatccgtataacgcataaagattaataataattgatataacaatgattcttattatcaatattatggcaggccagagcaagcagtaatttgttgagaagacaacaagttgcgcagaaatgcccattccgtcaggaatgggcacgcattcagaagcgggtatctaccgcagaggcgagtttttcgaccaggcgttcggtatcttcccagcccagacacgggtcggtaatggattgaccgtaagtgagcggctgactgccgacgattttttgcgttccttcgagcaggaaactttccgccataattccagcaatcgccgtagagccattgcggatttgctgacaaatatcctcacaaacttctaactggcgacggtgctgcttctggcagttaccgtggctgaaatccaccaccagatgttcaggtaaatcaaactcgtgcagcgtatcgcaggctgcggcgatatcatcggcatgataattcggttttttgccgccacgcataataatgtggccatacgggttgccgctggtctgatagatggtcatctgaccatttttgtctggcgagaggaacatatggctggcgcgggctgcgcggatagcatccacagcaatccgcgtattgccatcggtaccatttttaaaacctaccggacaggagagtgccgaagccatttcacggtggatctgactttcggtagtacgtgcgccaatcgcgccccaactgattaaatcagcaataaactgaccggtcaccatatcgaggaactcagtcgcggttgggacgcccagctcatttacctgtaaaagtaatttgcgcgccagctccagaccgtgatttacccgatagctgccgtttaaatctggatcggagattagtcctttccagccgacaacagttcgtggtttttcaaaataggtgcgcattacgatttccagccgtgactggtactggttgcgcagcgactgcagacggggggcgtactccattgcagcggtgagatcgtggatcgagcaggggccaataatgaccaacagtcgcttatcttcaccattgagtattttttcaattctgcggcgggagtcggtgacatgggtggcggcgccaggcgttacgggataccgtagcgcgagttcggcgggcgttaccaggctctcaatacgcgcagtacggagttcgtcagttctgttcattacaagtctcagaaatttgttgcttctacggcaggactgccgggaagtgatgcgcatcacgataaaccaatcgctgctgatttcaagtgcgaggtgtgtcacacctcgccgggtggttagcatcataacaaaaaaataagctaatgcactagttctctagtacattcggcgactaaggcccatgatatcgaggatcttggtggcaatctcttctaccgaataattggtactgttaatccacgggatctgatttttacggtacaacgcttccacttccgcgacttccatcctgcactgacgaagcgaggcatagcgactgttctcccgacgttcctcgcgaatcgccgccagacgttccgggtcgatagtcaggccgaacaatttatgctgaagcggtttgagcgacgcgggtagcaccagattatccatatcgtcggcaataaaggggtagtttgccgcgcggataccaaattgcattgccagataaagactggtgggggttttaccacagcgagaaacaccgagcaggatcacctgagcctgatccagattgcgcaacgaaatgccgtcatcgtgggcgagggtgtaatcaatcgccgcaatgcgcgcatcatatttattgagattattagggttaaggccatgggtacgatgagcaatcggcgttggatccagtttcatctcttgttgtagcggggcaaccagcgcctgaacgatatcctggcaaaagccttcactttgcaagatgatggcgcgaatctccggcaacacgatggagtagaagaccagcgggcgcacacctgtctggtgataaattgcgtcaatctgatccttcactgcccgtgcacggctctcattttcgacaaacggcagcgtaatgctgctgatagtgacgggaaattgtgacattactgcgtgtcctaatacctccgcagttattgccgtaccatcagaaatataaaaaacgtggcgatcaacagcattatccattttgttcttcccgtgatgcagacataattctatgaaagcataaattaaaaacgcacagaagcgtaggacgttatgtctggtttataaaatgaaccttcaattttattttttatgaaaacagcatttcatttttatggtttcgtttataccgatggtttatgtggaaattgtcgaagagagcagatttgcgcaacgctgggatcagtcttaaaaagtaaaaaaatatatttgcttgaacgattcaccgtttttttcatccggttaaatatgcaaagataaatgcgcagaaatgtgtttctcaaaccgttcatttatcacaaaaggattgttcgatgtccaacaatggctcgtcaccgctggtgctttggtataaccaactcggcatgaatgatgtagacagggttgggggcaaaaatgcctccctgggtgaaatgattactaacctttccggaatgggtgtttccgttccgaatggtttcgccacaaccgccgacgcgtttaaccagtttctggaccaaagcggcgtaaaccagcgcatttatgaactgctggataaaacggatattgacgatgttactcagcttgcgaaagcgggcgcgcaaatccgccagtggattatcgacactcccttccagcctgagctggaaaacgccatccgcgaagcctatgcacagctttccgccgatgacgaaaacgcctcttttgcggtgcgctcctccgccaccgcagaagatatgccggacgcttcttttgccggtcagcaggaaaccttcctcaacgttcagggttttgacgccgttctcgtggcagtgaagcatgtatttgcttctctgtttaacgatcgcgccatctcttatcgtgtgcaccagggttacgatcaccgtggcgtggcgctctctgccggtgttcagcggatggtgcgctccgacctcgcatcttctggcgtgatgttctccattgataccgaatccggctttgaccaggtggtgtttatcacttccgcatggggccttggggaaatggtcgtgcagggtgcggttaacccggatgagttttacgtccataaaccgacactggcggcgaatcgcccggctatcgtgcgtcgcaccatggggtcgaaaaaaatccgcatggtttacgcgccgacccaggagcacggcaagcaggttaaaatcgaagacgtaccgcaggaacagcgtgacatcttctcgctgaccaacgaagaagtgcaggaactggcaaaacaggccgtacaaattgagaaacactacggtcgcccgatggatattgagtgggcgaaagatggccacactggcaaactgttcattgtgcaggcgcgtccggaaaccgtgcgctcacgcggtcaggtcatggagcgttatacgctgcattcacagggtaagattatcgccgaaggccgtgctatcggtcatcgcatcggcgcgggtccggtgaaagtcatccatgagatcagcgaaatgaaccgcatcgaacctggtgacgtgctggtcactgacatgaccgacccggactgggaaccgatcatgaagaaagcatctgccatcgtcaccaaccgtggcggtcgtacctgtcacgcggcgatcatcgctcgtgaactgggcattccggcggtagtgggctgtggtgatgcaacagaacggatgaaagacggtgagaacgtcactgtttcttgtgccgaaggtgataccggttacgtctatgcggagttgctggaatttagcgtgaaaagctccagcgtagaaatgatgccggatctgccgttgaaagtgatgatgaacgtcggtaacccggaccgtgctttcgacttcgcctgcctgccgaacgaaggcgtgggccttgcgcgtctggaatttatcatcaaccgtatgattggcgtccacccacgcgcactgcttgagtttgacgatcaggaaccgcagttgcaaaatgaaatccgcgagatgatgaaaggttttgattctccgcgtgaattttacgttggtcgtctgactgaagggatcgcgacgctgggtgccgcgttttatccgaagcgcgtcattgtccgtctctctgattttaaatcgaacgaatatgccaacctggtcggtggtgagcgttacgagccagatgaagagaacccgatgctcggcttccgtggcgcgggacgctatgtttccgacagcttccgcgactgcttcgcgctggagtgcgaagcagtgaaacgtgtgcgcaacgacatggggctgaccaacgttgagatcatgatcccgttcgtgcgtaccgtagatcaggcgaaagcggtggttgaggaactggcgcgtcaggggctgaagcgtggtgagaacgggctgaaaatcatcatgatgtgtgaaatcccgtccaacgccttgctggccgagcagttcctcgaatatttcgacggcttctcaattggctcaaacgatatgacgcagctggcgctcggtctggaccgtgactccggcgtggtgtctgaattgttcgatgagcgcaacgatgcggtgaaagcactgctgtcgatggctatccgtgccgcgaagaaacagggcaaatatgtcgggatttgcggtcagggtccgtccgaccacgaagactttgccgcatggttgatggaagaggggatcgatagcctgtctctgaacccggacaccgtggtgcaaacctggttaagcttggctgaactgaagaaataaaataaatccccggcggcgttcagtcgccggggttatgtgatccccgaagatgaaacttattcaatctcttcacagacatcctgagttaaccgccgcataatatcttttcttaacaaaaacttttgtattttacctgaggcagtacgcggtagtttttcgattaccacgatatgttcaggatatttatattttgcgacccgtttacggctaaaaaaagccaccacctcttccagcgataatgaatgatgcggcgctttcagcacgacataagcgcatgatcgttcacctaaacgttcatcgggcattgcaaccacacaggcatcgtgaattttaggatgctgcaataaaatatcttctacttcacggctgctaatattttcgccgccgcggacaataatatcttttttgcgtccggtaattttggtgatgctgccaacttactgatttagtgtatgatggtgtttttgaggtgctccagtggcttctgtttctatcagctgtccctcctgttcagctactgacggtgtggtgcgtaacggcaaaagcactgccggacatcagcgctatctctgctctcactgccgtaaaacatggcaactgcagttcacttacaccgcttctcaacccggtacgcaccagaaaatcattgatatggccatgaatggcgttggatgccgggcaactgcacgcattatgggcgttggcctcaacacgattttacgtcacttaaaaaactcaggccgcagtcggtaacctcgcgcatacagccgggcagtgacgtcatcgtctgcgcggaaatggacgaacagtggggctatgtcggggctaaatcgcgccagcgctggctgttttacgcgtatgacagtctccggaagacggttgttgcgcacgtattcggtgaacgcactatggcgacgctggggcgtcttatgagcctgctgtcaccctttgacgtggtgatatggatgacggatggctggccgctgtatgaatcccgcctgaagggaaagctgcacgtaatcagcaagcgatatacgcagcgaattgagcggcataacctgaatctgaggcagcacctggcacggctgggacggaagtcgctgtcgttctcaaaatcggtggagctgcatgacaaagtcatcgggcattatctgaacataaaacactatcaataagttggagtcattaccgtaatttttatatagccagcctcatccatacggcagagatcgccgctgtaataccagccttcttcatccagcgcacgggcggttaattcaggttcatcaaaataccccataaacacattggggccacgcgaggcttcttcaccttcgcaacctggcggtaaggtcttgcgtgcgtcatcgaccactttaatctctacacctgcggcagcgtaaccatcggtgtgcataaagcgcgacaaaggatcatcgagattcaccaccgcatgcggcgaactttctgtggaaccataaacacttaataatttaatgccagcgctgctggcattcgcgcgccacttttttggggattgtggtaccgccgcaaagaaagaagcgcagcgctgaaaggtctgcgggttgtttctctagtaaattcaaaagatcatagacaaacggcgttgcgccgagcatacaggtgcaacgctgctgctcaagcagcgcgagacatgcatcaggagtgaaaatatctaacaacacgctgcgagcaccaattaaaaatggtgctgttacgccatgcagaaatcccgttgcgtgaccaagtggcgcaggcatcataaagacatcctgccaggtcagattcagccgcgcgcaataagcccgctcactggcgagaatattgttatgcgttagcattacgccctttggcagaccctcggttccggaggtaaacagcaccgcagctaattcatcgccgtgggtcgttatcgccgtggtcagtgggatattgtcggcgataatctgacttaatgagagggaagaggtggcgggagccagtttgtccacgccgacaatttgttgtagttgtggaagctgattttgcagcggcaggattaaatctaccggacgcgtttgtttaaacaacgtcggtgcaaagaatatttttgcctgacacttattgagcacccacaccagttctgcttcccgccaggaaggcaacagcggcacggaaaccgcaccggttttcaggcaggcaagatagataacggtaaattcacaccagcctggcagttgaaatgcgatgcgatcgcctgattcaatacccttcgctaacatccagtttgccagacagctcgcggcgtgatcgagcgcgctataggtgtacgatgcaccatgattatcgaccacggcaattttgtctggcatcgcacgagcggtctgctgccagtaatcggccagcgaagcatcgccccatagcccttgctgacgatacgccgcacgacgttgttcgttgaacgttaatgtcactttcatgttggactctcgaaacagaacatcaggcccgagatgcgggcctgtgggatgcatgattagccgtagcgaaaatcaataccgaaggtgcctgcgggatattgccactgttcgagaatagtgttaccgcacagcacccgacaggtgccgcactccagacaaccggcagaatcaaaatgaatgttgccggcgtcatcctgcttataaagtccggcagggcaggctttcattaatttacggaattcattgatgtcgggatttgccgccagaatgatatgcgggtggccctcatcaacatggaatttattgacgcctaatttgatgtcgacgttaaccgtagcgttctggctcatagcgcggttgctcccttaatgccatctttcagcaagttgatcagcccaattttcttcgcatgtcccatgatcatttttcgtaccggctggtttggtttgccgtcgatggtgaacatctcgttcatgatgtcggctaccattcgtgggtattggctaaacaggcgcgggttttccatcagcgccgggatcttgcgaaaatgctgcatatcacgcatgacgcagctttgttccagctcacgcttgtattgcgccagactgctggcggagaaatcctcgcgttctttggcggcgatcaccgttgtggcggcagcctgagccgatgcaatggctaaatccatgccgcggaccgtaaaacccaaattcagacagaagcctgcggcgtcaccaacgatcatcacgccctcgttaaccagttgcggcaccatcgccagaccgccttccggcaccatatgcgcggaatattcaagcagtttgccgccgctaattagtgggcgaatggcggggtgttgtttaaaatcttccagcatttgcggcacgcttttttgcgcatgggcgatatcacccaatccacaaaccagccccaacgatacggaatcgttgttggtatagaggaatccgccacccatcaggccgtcagaaggggaaccggcaaacagctaggcggcaccttcctcgcccgtaatattaaagcgatcgttgatctgttctggtgtgaggccaataacctctttaacaccaacagcgtaatgatgcggatcggaagcgggaaccattcccagcgagcggccaagcatcgagttaacgccatcagccagaatcaccacattcgcttcgagaatatcatccccagcctgcacgccagttaccttgtttccttcacgaaccagcgcatcgacgcgaacgcctgggataaactgcgcgcccgcctgctcggcttgttccatcaaccacgggtccagacgattacgcaatacggtataagatgcgtgttgcggaacatctggctgctcgcggtgaaaatcgagggtaacggcgctttcttcggttaagaaggagattttctcgcgtgtgaccttgcgttctaccggcgctgatactgcaaagcctggaatgattgcttcaagtgtgtgggcataaagacgcccgccggtcatgtttttacatccggcactgtcgccgcgttctatcaccaggacatccagcccggctcgcgccatgaccagtgcggcaacgctaccagcaacgcccgcaccgaccacaatggcatcaaatttgtcatccgacatgcgttatgctcccttcccgctgcgtttacagcgggagatgtggttgaaaggggaattagcggctcaactggctaatcagggcagggacgactttgtagatatcgcccaccagaccgtagtcggcataattgaagattggcgcatttttatctttattgatggcgacaatcacttttgcgccgttgccgccaaccatatgctggatctgcccggagatccccagcgtcaggtagagatcggatttcagcaacacgccggagacaccgatataacgttcacgctccatccagttctcgccttcggcaattggacgtgaacagccgacttcagcattcagcaccgccgccagttcgtggaccattttcaggtcatcctgcgctgccagaccacgaccgacgccaaccacacgttttgctttgctcaggtccacgctgcttgccgctttcgcacggcgttcgcgacagagaatttcatgacgcggggcaacataaggtaccgtttctgtcgggcactgatgagaggtatcactggtgcacggttcctgaacaccgggtgcaagggtaatgatcgccagcgggctgttgatcttttcctgagcgaacgctaacccgccatacatccggtgttcggcgcaaatgtgaccatcgacaatatccactgccgtggcatcgttcaccagcgccgcattcagttgcacacttaaccgtgctgccagcgctttaccacgtttcgtcgcggccagcagcaacatagcgggggggttatctttcagcagggcagcaatgctttcggcgtaattttcagtacgttgcagcgcatcattttgctcaagaacataaatacattttggaccataaggcataactgcctgcgcctggtcggtattttgtacaatggcatacacctgttggccccattgctgcgcgccgccaaacagttcagcataacgttcaggattatcgctaaagacccagacgctgtttaattgactcatcgtttcttctccgtaggcttcagttcagggctttcggtaatgactccaacttattgatagtgttttatgttcagataatgcccgatgactttgtcatgcagctccaccgattttgagaacgacagcgacttccgtcccagccgtgccaggtgctgcctcagattcaggttatgccgctcaattcgctgcgtatatcgcttgctgattacgtgcagctttcccttcaggcgggattcatacagcggccagccatccgtcatccatatcaccacgtcaaagggtgacagcaggctcataagacgccccagcgtcgccatagtgcgttcaccgaatacgtgcgcaacaaccgtcttccggagactgtcatacgcgtaaaacagccagcgctggcgcgatttagccccgacatagccccactgttcgtccatttccgcgcagacgatgacgtcactgcccggctgtatgcgcgaggttaccgactgcggcctgagttttttaagtgacgtaaaatcgtgttgaggccaacgcccataatgcgtgcagttgcccggcatccaacgccattcatggccatatcaatgattttctggtgcgtaccgggttgagaagcggtgtaagtgaactgcagttgccatgttttacggcagtgagagcagagatagcgctgatgtccggcagtgcttttgccgttacgcaccaccccgtcagtagctgaacaggagggacagctgatagaaacagaagccactggagcacctcaaaaacaccatcatacactaaatcagtaagttggcagcatcacccacgttcatgacaatgaaaccgagttgatttacgtcaagaaaggggtagcaaggtttaccatcgattcttcgttatatgtcgcgcacgccgatgacattgtggtgatagaacgtggcaggctgcatgcggtggcctctgacgttaacgatccagcaacgacgtgtacctgtgcgctgtacggctttcagtttcagggggctgaggaaaatcagctactgcaaccgcattcttgcccggtaattgccgcagggcagggaaaagaagtcattaaaaccttatttaatgagctaagtgtgattttgccgcaaagtaaaaatagccaaacatcttcgttatgggatgcatttgcctatacattagcaattctttactacgaaaactttaaaaatgcttatcgttcggagcaggggtatattaaaaaagatgttctgataaaagatattcttttctatctgaataataattatcgcgaaaaaatcactttagaacagttatcgaaaaaatttcgtgccagcgtcagttatatttgccatgaatttaccaaagagtatcgtatttcccctattaactatgttattcaacggcgtatgacggaagcaaaatggtcactcactaatactgaattatcacaggcagagatctcctggcgtgtgggttatgaaaatgtcgatcactttgccaaactgtttttgcgccatgtcggttgttcgcccagcgattaccgtaggcaatttaaaaattgttttgcggaacaagaaatcttatctgaatttcctcaaccggtaagtcttgccggataaatctggcggcgcactttgttaaaaagctgcgccgcctgcagattatttgttctgatagtctttcaggatctgccgacctgctacgtaaatcataatttcgtctgtaccgccgccgggtgatgctgccaacttactgatttagtgtatgatggtgtttttgaggtgctccagtggcttctgtttctatcagctgtccctcctgttcagctactgacggtgtggtgcgtaacggcaaaagcactgccggacatcagcgctatctctgctctcactgccgtaaaacatggcaactgcagttcacttacaccgcttctcaacccggtacgcaccagaaaatcattgatatggccatgaatggcgttggatgccgggcaactgcacgcattatgggcgttggcctcaacacgattttacgtcacttaaaaaactcaggccgcagtcggtaacctcgcgcatacagccgggcagtgacgtcatcgtctgcgcggaaatggacgaacagtggggctatgtcggggctaaatcgcgccagcgctggctgttttacgcgtatgacagtctccggaagacggttgttgcgcacgtattcggtgaacgcactatggcgacgctggggcgtcttatgagcctgctgtcaccctttgacgtggtgatatggatgacggatggctggccgctgtatgaatcccgcctgaagggaaagctgcacgtaatcagcaagcgatatacgcagcgaattgagcggcataacctgaatctgaggcagcacctggcacggctgggacggaagtcgctgtcgttctcaaaatcggtggagctgcatgacaaagtcatcgggcattatctgaacataaaacactatcaataagttggagtcattaccgcgcgaatgaaggcgatatctggcgcaatcgctttgtaatagagatattctttgttatcaaactcgaccagtttaatcaggtcttctttcgtgacttcattcagtttgccgccttgctggcgtggatcgacaaatgtcccgatgccaatatcactaataataccaggctggtgggctgcggcggcgcgtaaggtttgtgtaagtacaccttgtggatagttataagcaataattttattttgttctgcgagttcagaaatacgcggcgattgtccccagtgaccacataatgcccatttcaccagaccttcttgcgccagaggactaataccacggtcggcgcgatcgccaagccctgtcggactaataatcgataaattacgtggcgtttgagtctgtttatatttatcagcaagagctgtaattaacgtggtggcttccagaataccgccgccagcgcctaacacacaaagtgttgcttcgtcgggaatataattcaccgcttcctgtgccgacaggaccggcactcgtccattaatacgaggtggttttacaggtttcattgttaattcctgattcagatgtgattttccctacgccagatggagaattagcgcacagagactcacgaaatatttttattaaatacggttaaatatattttttaagttcggcggggagggtgttcccgccgaaatattattgcttatgcctggtgtaaaatagttaataccgtgcgtaaatcatttaccgagatttgccctggtgcagaggctttttttaccgcaccaaaagttgccgccgagccaaatacttcaccagccagacgagaaattacgccagtttttgccatcgacatcgtgatgattggacgatcggcatactgctcctgcatctccagggtcgcggtaagcaacgtcagcacatcgctggtactttgcggcatcagcgcaatcttaggaatatcggcgtcgaaggactgcattttgcgcagacgggcaatgatttcttcggcttccggcgttttatggaagtcatggttggacatgacaactttcacatcatgcgcgtgggcgtaggcgacggtttctttaacctgatcatcgccggtaaataactccagatcgatcatatcaaccaggccgctgtcgatggctgcacgattgagagcaatataagcctcggtggaaatcgcctgctcgccgccttctttggcactgcggaaggtaaacagcagcggtttttctggcatggtttcacggagaatttttgccgccgccatgacagactccacattggagaggtcggcaaagtggtccacacgccattccagaatatcaaagtccgcttcacgataggcgagagcttcggatttcacgcgggcgatatctttcgccatcagcgagacgatgattttaggtgcgcccgcaccaatgacgagatcttttacagttacggttttcattttttaccctttctgcacgcggtcagcctgtcaggcaccgaaccccatgacctgtttaacatattccagagggaaatctttgccagtccataacgtgaactgttcagccccttgccacaacaacatgccgtatccatcaatcgttttgcaacctgcttgttgtgcctgctgcaataacttcgtcatatgcgggttatacacgcattcagtgaccagcagtcccggatgtaacagactgatatcattaaccaatgattcattctcaagggggttcatacctacttttgtgccattggttaaaatgtcggcggaagccaggacttcagcaaaggcttgctgatcggcgagatcggtaaccgtgacgacacaatcggtgttttcgttaacccgctgcgcgaaggcgagggctttatcgaagaactcatcccgacggttaaagagtttaatttcttttaaaccttcaattgccccctgcgcgccaatcgctgttgaggcacctccggcccctaacagcaccatcgttttgcctttgatatcaaaaccgctctctttaatggcgcgaatatggcccgtgccgtcggtgttatagccacgcagatagccatcatcattaacgatggtgttgatggcacccaccagtttggctgctggcgttaattcatcaacatattcacacgccagttgtttgttcggcatcgacacaccagttccgcgcattttgagggcttttaatccttcaattgctccgggaaagctatcgttatccacttcgaaggccatataggtaaatggcaatcccgctttttctaaggctttattctgcatttcaggcgataaactgtggcggataggataagccatcaacccaatcaattcgtattttgcggtaacatccataattaactcctttaacctctatgcttaattgtgtttaaccgggtgctaaatttgcgttcgccaaaccgcacatcattctcaggaataataaaaacgcggtaatagcggctaaaaacaataattgcggtaatcagggccagcagcgcgaaagtaaaatcgagaacaatgatatattgcaggccgatgttcgacagataaccggtaatcagcggaataacaaagttagccagtccacccatcatcatataaatactggtgactttggctttgcttttggggaaaaactctgacatgaccgaaacaccgagctgtaaaatgccgccagctgctgagaaaccgataacaaaggcgccggcattacacaccagtggagaagggtacaggtagataatggcagctgttattgttgccagcgcagagttaaatacattagcccagatgggccggaccatttttttcagtagtgcggcaaaaataaagacacagaccaacgagcccatactgtaataagagatggtttttaatgcctcagcttctgacataccagcaaaagccatcgcatatttgggcatccacaccacaatcacataaaaggtcgagaatgcggctacaccgaacagtaccgatgaaacaccttccagccagactaacggtttgctgttcatttgcggtaattcattagctacgctggcgtccaccaactggctggggaatttgcttttcaacagcatcagcgtgatcagtacaaacagaatacccggaataatcagcccatagccgtaccagatattattgagcaacatatagctcaccagcattgggtagaacatttgcccaaatgacaccatcgctttaaccagtatgaccgccgaaccagaggctttcggaaagcattccatgagcgcggggtagccacccgtatccagcgctgagttagcgatacctacgcacactgccagaccgtaggcgagagttaaattcgggcaagcgggaataccaaagaagaatagcagatacattattactgccattaatatcaccgcccgacgaccaaacttatcggagatcacaccgaagaataaaatactgatcaatcgccccaaaccgataccggaaattaaataggcaatgcccgcgttgtcagtggaaaacttttctgccagagatgtcatattttgggcaagcgtaataacactaatgccgtgcaggaaatagctgaagtaaatacaaagaacagccaggataaatggcgtgctgaaagccttattttgagacattttcacagctccttgctgaaagataatttcgttaccgtacgtattgttctccgacggtttacataattactatactgaagatgattttccctgggtacatggcataaagtttatgtttccaggaatattgcatgtcatagtttgtttttgatcgcgattttccttagttagcgcagaaagagttatttatccgtaagatcttgcatgacctgaaaagaatattgcattacccacccggagcgacattttcctttagcgagtgatgccgcgtttttttgcggctgcgtaagccgataaacagtgccagtaaaaaaccgatggcagcgatggcggtatcgaaccacataatatcggcaatacttctttgggacagatgagccgtaatcaacggaatagtaaaggtcgcaatactgcccgcactgtaatagatccctgtagctttacctttagcgtaagggaaacgttcagccattaacgtcaggccaatttgcacaacacctccagcagaggtaaaaccaatgacaaaagcaaatattatcaccacataaaatgtgggatgcaggcagacggtaaacagagcaataaatgagataaaggtgtacagcatcagtaatgttgttgggcgaacggtattacgaatgagtggagcggtaataaatacacaaagcagcgaacccacggtgtagatactgagtagtttgatcgacatagtgtatgacatgcctgcaacaaattgtccgtactgtgccagccactggctaaccagataaaacgttgccattgagatatagccatataaggtataactggctaaatcgataattgaacagcgatgttccgtagagctggtggttttctttatgacaggtaagcgacgacccggatggggtgggaacgtacaacggtataaaaacagagcgttaataaacataatgcctgcagcaatcataaaggaccaaccgaaccacagttcagcccacactaacaggctaatgattagcggtaataaaaattgtccgctggaaacaaatgctttaattaaaatattggctgtcccaggtgagcgtggaaaagcttccatcaaactgggataagtgcctgcatcgagaaaactgtttgccattcccgccagaaagccaaaaacataagcgataatgatgttattggtctgcaggatgccaaaaaagaaggccatatagcagcacatcccgagcatgataaaagggcggcgaccaaagcgatcggataataatcctgcaaaaagcaagacacttaatcgaccaatgcccagcgatgagataactatcgagacacccgcggcattagtctgccaaagtgtctccagcgaggccatattcaggctcatcaaaatgacgcccataccatgcaccaggtaattaaaatacaacccaagtgcggtagggtaatagggatttttcataggttctacttagcaaaggtgctttaaaaagtgtagcgatgttgtgtcagtatccattcattattgttgtaacaacgacaattcctttctgtggaaaaattaacaaagccgctccagatcgtgtgcatataattcagcggctaccgattgatagatcttccagtcaataaaattgccatcagggtagacttgttgaaacgcggttaagtcggggaaaaaacgcatggtgttgttgccgatgcggttatttattttctctatgatggcatgaagatgtttttttcgttgctgacgcatagccaacagttgctcgactacacaatcaggaatggcgcatttgccattttcccactgacgccagctttcactgtcaccggtctgggcaatccaggtcgcgcattcatcaatagtcatggcaaaaatatggcggagtgcctggagttcataagcgttcatcgtgtaatggctgcatgaaataaacaataaaatataaataacattatcagcctgctgacggcttgaagagagtcacagtatcttgtgcaacattattggaaagagtgaggggcgaggtagcgaagcggaaaaatgttaaaaaaaagcccatcgtgggagatgggcaaagactacacacagcaattcgttgtttcactcaggggatttccatgcttataaatcaatatgttgatttataaccgtgagctaatagtaggcatacggactttttgcgtcgatcagattcgtctcattagtttaaaaactgtaaagaatttgcgacaggtactaccagctgggtaatgactccaacttattgatagtgttttatgttcagataatgcccgatgactttgtcatgcagctccaccgattttgagaacgacagcgacttccgtcccagccgtgccaggtgctgcctcaaattcaggttatgccgctcaattcgctgcgtatatcgcttgctgattacgtgcagctttcccttcaggcgggattcatacagcggccagccatccgtcatccatatcaccacgtcaaagggtgacagcaggctcataagacgccccagcgtcgccatagtgcgttcaccgaatacgtgcgcaacaaccgtcttccggagactgtcatacgcgtaaaacagccagcgctggcgcgatttagccccgacatagccccactgttcgtccatttccgcgcagacgatgacgtcactgcccggctgtatgcgcgaggttaccgactgcggcctgagttttttaagtgacgtaaaatcgtgttgaggtcaacgcccataatgcgtgcagttgcccggcatccaacgccattcatggccatatcaatgattttctggtgcgtaccgggttgagaagcggtgtaagtgaactgcagttgccatgttttacggcagtgagagcagagatagcgctgatgtccggcagtgcttttgccgttacgcaccacaccgtcagtagctgaacaggagggacagctgatagaaacagaagccactggagcacctcaaaaacaccatcatacactaaatcagtaagttggcagcatcacctaccagctgaatggcggtaagcaggaaaatatggggaagagcaagcaaatatcaattagcggtgattaacaatcaggcggcagagccgcctgatgagaaattacttattcggtttctcgatttcgccaagttcttcgagaatttcttccggttggtccgtcggcggcgggacttcttccacccacgcggcaaacagacgccaggaaacggctaacagaaccggaccaataaacagaccgatcatcccgaaagcaatcaaaccaccaataacgccagagaggatcaggatcagcggtaaatcggcacccatgcgaattaacattgggcggatgacgttatccagcgtgccaaccacaccgctccacactaacaataccgttccccaggtggtatcgccggtccagtagagccagataatcgccggaatcagtaccggcaacgggccaagctggacaaggcaggagaggatcattaacaccgttagcaacgttgcataaggtacgccggatacggcgaggccgatactgccaagcactgcctgtactaacgccgtcaccaccacacccagcgccaccgcgcggatagcctgtgccgccagcagcacggcggcatctccgcgaacgcctgccagacgggttgcaaaatggcgaatgccttgtgccacctgttcaccgcgccagtacagcagggcactgaagagaagcatcagcgcacaatgcaccataaagcgcccgatatgcgccgcctgcccaacgaaccaggtggtggtggtgccaatataagggcggactttcgccatgatcgccgtaccccccatatccagcaagttgtgccagcctgcatacagcttcgcgccaatcaccggaatggtattaagccacgccagatcgggtaacgtcatgtcgccgctggaaatggctttaattagcgggccgctgccgtcgacgatactgttaaccagcaaagcaatagggatgataaacaccatcactaataacagcgtcatcaccagaacggcgagagagcggcggccaaacatgatcttttgcaaacgtaacaataccggccaggtggcgataaccaccgtaccggcccatgcaaagccgagaataaagggttgaacaatccacagacatgccacaatcatgatggctaaaaacagcaccgaaagcagaatttgtgcgacatccctgggctgacgaacatttaccataactacttttcaccttttttgtgcgtcaaatcgtcgacgcgacgtgaacacgcgaaactcacctgcataatgatgagcaatttcagcggtttttaacaggccgattctgcccttaattctgatgggcgtgttagaaaaaaatgtggtacaacaactcaggcaacacgcaaacgatttactcgtcgtatttcaagttgcatgcgctgcggctacgttcgttcaccccagtcacttactattgtaagctcctggagttcactcgcttgccgccttcctgcaactcgaaatccatagagtaaataaacatcacctttcagtgcgctattgcagccgcctgaaagaatagtgtatcgacctacatcacagaccgcaggaaagggtcaatataatgattccacagatttcccaggcacccggcgtcgttcaactggtgcttaattttttgcaagagctggagcaacaaggttttaccggcgatacggcgacaagttatgccgatcgtctgacaatgtcgaccgacaacagtatttaccaacttctccccgatgcggtggtatttccgcgttcaaccgcagatgtggcgctgatcgcccgtcttgccgcgcaggaacgctattcatcgctgatctttaccccccgcggcggcggcaccggcactaacggtcaggcgctcaaccaggggattattgttgatatgtcccgccatatgaaccgcatcatcgaaattaaccctgaagagggctgggtgcgcgttgaggccggggtgataaaagatcaactcaatcagtacctgaaaccgttcggctacttttttgcaccagaactttcgaccagcaaccgggcaacgctcggcgggatgatcaataccgatgcatccggtcagggatcgctggtctatggcaaaacgtcagatcacgtacttggcgtacgcgcggtgttgttggggggcgatattctcgatacgcaacctttacccgtcgaactggcggaaacgctgggtaaaaccaataccacaatcgggcgaatttataacacggtttatcaacgttgccgtctgcaacgccagttaatcatcgacaacttccccaaacttaaccgctttcttaccggttacgatctgcgtcatgtctttaacgatgagatgaccgagttcgacctgacgcgcattctgacgggttcagaagggacgctggcctttattaccgaagcgcggctggatattacgcccttgcctaaagtgcgccgtctggtgaacgtcaaatatgactcttttgactccgcgctgcgtaacgcgccgtttatggttgaggcgcgggcgctttcggtagagacggtggactcaaaagtgctgaatctggcgcgggaagatattgtctggcattccgtcagcgagttgattaccgatgtgcctgacaaagagatgctcgggctgaacattgtggaatttgctggtgatgatgaggcgctgattgacgagcgagttaatgcactctgtgtgcggcttgatgagctgattgccagccaacaggcaggtgtgattggctggcaggtgtgccgcgagctggcgggggttgaacgtatctatgcaatgcgcaaaaaagccgttggtctgcttggcaatgccaaaggtgccgctaagccaattccgtttgctgaggatacctgcgtaccgccggaacatctggccgattatattgctgaatttcgcgcgctgctcgacagccacggcttaagctacggtatgttcggtcacgtcgacgcaggtgttttgcacgtccgtccggcactggatatgtgcgatccgcaacaagagattttgatgaagcaaatctctgatgacgtggtggcgctgactgcgaaatacggtggtttgttgtggggcgagcacggcaaaggttttcgcgctgaatacagcccggcgtttttcggtgaggaactttttgcagaactgcgcaaagtgaaagcggcatttgacccgcataaccgactcaacccagggaagatttgcccgccagaaggtctcgatgcgccgatgatgaaagtggacgcggtgaagcgcggtacattcgatcggcagatccccattgcggtacgccagcagtggcgcggtgcgatggagtgtaacggcaacggtttatgcttcaactttgatgcccgtagtccgatgtgtccgtcgatgaagatcacccagaaccggattcattcaccgaaagggcgcgcaacgctggtgcgtgaatggctgcgtttgttggcggatcgcggcgttgatccactcaaactggaacaagaactgcctgaatccggcgtcagtttacggacgttaattgcccgcacgcgcaatagctggcatgcgaataaaggcgaatatgacttctcacacgaagtcaaagaggcgatgtcgggctgtctggcctgtaaagcgtgttcgacccagtgccccatcaaaattgatgtgccggagtttcgctctcgtttcctgcagctctatcacacccgttatttacgcccgctgcgcgaccacctcgtcgctacggtcgagagctacgcaccgctgatggcacgcgcgccgaaaacctttaacttcttcattaaccagccgctggtgcgcaaactctcggaaaaacatatcggcatggttgatttgccactgctgtcggtcccctcgctacaacaacaaatggtggggcatcgctcggcaaacatgacgctggaacagcttgaagctctcaatgcagagcagaaagcgcgcacggtgttggtggtgcaggacccctttaccagctattacgatgcgcaagtggtggcggattttgtccgtctggttgaaaaattaggtttccagcctgtgttactgccattttcgccaaatggcaaagcccagcatatcaaaggctttcttaatcgttttgcgaagacggcgaaaaagacggcggatttcctcaaccgtatggctaagcttgggatgccaatggtgggcgtcgatccggcgctggtactttgttatcgcgatgaatataaactggcgctgggcgaggaacgtggcgagtttaacgtcttacttgcgaatgaatggctggcaagcgcacttgagtcacatccagtggctacagtcagcggtgaatcatggtatttctttggtcactgtaccgaggttaccgctttgccgggcgcgccagcacaatgggccgcgatatttgcccgttttggcgcgaaactggaaaatgtcagcgtgggttgctgcggcatggcagggacttacggacatgaagcgaaaaaccatgaaaattcgctcgggatctatgagttatcctggcatcaggctatgcagcgactgccgcgtaaccgctgtctggcgaccggatattcctgccgtagccaggtaaaacgggttgaaggcacgggggtacgccatcctgtgcaggctttactggagattattaaatgatatggaaacggaaaatcaccctggaagcactgaatgctatgggtgaaggaaacatggtggggttcctggatattcgctttgaacatattggtgatgacacccttgaagcgacaatgccagtagactcgcggacaaagcagcctttcgggttgctgcatggaggagcatccgtggtactggccgaaagtatcggttccgttgccggttatttatgtaccgaaggtgagcaaaaagtggttggtctggaaatcaatgctaatcacgtccgctcggcacgagaagggcgggtgcgcggcatatgtaaaccgttgcatctcggttcgcgtcaccaggtctggcagattgaaatcttcgatgagaaagggcgtttgtgctgttcgtcacgattgacgaccgccattttgtgacgttgtcaccagaaaagtgtgacgcatattgcttttggtcattatctgcacagtaaacggtggtatactgtgcacgtcttgtctaaaagcgaggatgctatgtctactcaacttgatcccacccagctggccattgaatttttacgccgtgaccagagcaatctttcacctgcccaatatctcaaacgtctgaaacaactagaacttgaatttgctgacctgcttactctctcttctactgaattaaaagaagaaatctactttgcctggcgtctgggcgtgcattgatcctgacttaatgccgcaagttcgccaaatcgacctggattaacctccgtccaggttcgatgaccttcttaatactgcttatctaccgcctgatattgttcaaaaataatactaatcgcagtttgtgttaaaacggcgggttagctttatgagattattcttatcgccccttcaagagctaagccactgagagtgccggagataagcgccggatggggtagaaacccttaagcctgtgtcgcacagacttaagggttttcttatttctgaacgctgcacttttttacctatctcttaaatagtcattttcaatacaactttttctttttcatcacagccttaatgctccttagataataaccattatctaacaatgagatacctaattcttagcgtgcctgttaacccacacatcagggtctatgcttattaaaagcaggcaaaaagcatgttttacggtaaagcccctgcgtttgctgggttgaactgataatcattatcactagcatgctgttatacgctgaaagcgatgaagtgaggtaaatcgatggacatgcattcaggaacctttaacccacaagatttcgcctggcaaggcttaacgctgacacccgcagcggcgatacacatccgtgagctggtggcaaagcagccgggtatggtcggcgtgcgcttaggcgtgaagcaaacgggctgcgcgggctttggctatgtgctcgacagtgttagcgagccggacaaagacgatctgctgtttgaacacgacggcgcgaagctgtttgtcccgctgcaagcgatgccgtttattgatggcacggaagtcgatttcgttcgtgaaggacttaatcagatattcaaatttcacaaccctaaagcccagaatgaatgtggctgtggcgaaagctttggggtataggcggtactatgtctcgtaatactgaagcaactgacgatgtcaaaacctggaccggcggcccgctgaattataaagaaggattcttcacccagttagccaccgatgagctggcaaaggggataaacgaagaggtggtgcgcgcaatttcggcgaagcgtaatgagccggagtggatgctggagtttcgtctaaacgcctatcgcgcatggctggagatggaagaaccgcactggttgaaagcgcactacgacaagctgaattatcaggattacagttactactcagcaccatcgtgcggtaattgtgacgacacttgcgcgtctgaacctggcgcggtgcagcaaactggcgcgaacgcctttttaagtaaagaggtggaggcggcgtttgagcagttgggcgttcccgtgcgggaaggcaaagaggtggcggtggatgccattttcgactctgtttcggttgccactacttatcgcgaaaaactggcggagcagggaattattttctgttcctttggtgaggcgatccacgatcatccggaactggtgcgtaaatatctcggcactgtggtgccgggaaatgacaacttctttgccgcgcttaatgcggcggtagcctctgacggtacgtttatttatgtgcctaaaggcgtgcgctgcccgatggaactttccacctattttcgcattaacgcggaaaaaaccgggcagtttgagcgcaccattctggtggccgacgaagacagctacgtcagctacattgaaggctgttccgctccggtgcgtgacagctatcagttacacgcggcggtggtggaagtcatcatccataaaaacgccgaggtgaaatattccacggtacaaaactggttccctggcgataacaacaccggcggtattctcaatttcgtcaccaagcgtgctttgtgcgaaggcgaaaacagcaaaatgtcatggacgcaatcagaaaccgggtcagcgattacgtggaaatatcccagctgcattttgcgcggcgataactccattggtgagttttactcagtggcgctgaccagcggtcatcagcaagcggataccggcaccaagatgatccacatcggtaaaaacaccaaatcgaccattatctcgaaagggatctctgccggacatagtcagaacagttatcgcggcttagtgaaaatcatgccgacggcaaccaatgcgcgcaatttcactcagtgcgactcaatgctgattggcgctaattgtggggcgcataccttcccgtatgtcgaatgtcgcaataacagcgcacaactggagcacgaggcaacgacatcacgtattggtgaagatcaactgttttactgcctgcaacgcgggattagcgaagaagacgccatctcgatgattgttaacggtttctgcaaagacgtgttctcagaactgccgctggaatttgccgttgaagcacaaaaactcctcgccatcagtcttgaacacagcgtcggataaggaataaacatgttaagtattaaagatttacacgtcagcgtggaagataaagctatcctgcgtggattaagcctcgacgttcgtcccggcgaagttcacgccattatggggccaaacggttcgggcaaaagtaccttatcggcaacgcttgccgggcgagaagattatgaagtgacgggcggcacggttgagttcaaaggcaaagatttgcttgcgctgtcgccggaagatcgtgcaggcgaaggcatctttatggccttccagtatccggtggagattcccggcgtcagtaaccagtttttcctgcaaacggcacttaatgcggtgcgcagctatcgcggccaggaaacgctcgaccgctttgattttcaggatttgatggaagagaaaatcgctctcctgaagatgccggaagatttattaacccgttcggtaaacgttggtttttccggcggcgagaaaaagcgcaacgatattttgcaaatggcggtgctggaaccggagttatgcattcttgatgaatcggactccgggctggatattgacgcattaaaagtggttgccgatggcgtgaactcgctgcgtgacggcaagcgctcattcatcattgttacgcactaccaacgcattctcgactacatcaagcctgattacgtccatgtgctatatcagggacgaattgtgaaatccggcgatttcacgttggtcaaacaactggaggagcagggttatggctggcttaccgaacagcagtaatgcgctgcaacagtggcatcacttgtttgaagctgaagggacaaaacgctcaccgcaagcacagcagcatttacaacaattgctgcgtaccggactgccgacacgtaaacatgaaaactggaaatatacgccgctggaagggctgaccaatagtcagtttgtcagcattgcgggagatatatccccacagcagcgtgatgccttagcgttaacgttagacgccgtgcggctggtgtttgtcgatggacgttacgtgcccgcgctgagcgatgcaattgaaggcagcggatatgaagtgagcattaacgacgaccgtcaggggttacccgacgctattcaggcggaagtgtttctgcatttgacggaaagcctggcacaaagcgtgacgcatatcgccgtgaagcgcggtcaacggccggcaaagccattgctgttaatgcatatcacccagggcgtggcaggtgaagaggtgaacactgcccattaccggcatcatctggatctggcggaaggtgccgaagcaacggtgatcgaacattttgtcagccttaatgatgctcgtcattttaccggggcacggttcactatcaatgtcgcagcgaacgcccacttgcagcatatcaagctggcgtttgaaaacccgctcagtcaccactttgctcataacgatttgttgctggctgaggatgccaccgcatttagccatagtttcctgctgggtggcgcagtgttacgacacaacaccagtacgcaactcaatggcgaaaacagcacgctgcggatcaatagcctggcgatgccggtgaaaaacgaggtgtgtgatacccgtacctggctggaacacaataaaggtttttgtaacagccgacagttgcacaaaactatcgtcagcgacaaaggccgcgcggtatttaacggtttgatcaacgtcgcgcagcacgccatcaaaacggatggtcagatgaccaacaataatctgctgatgggcaaaatggcggaagtggatacaaaaccgcagctggaaatctatgcagatgatgtgaaatgcagccacggcgcgacggtggggcgtattgatgatgaacagatgttctatctgcgctcgcgcgggatcaatcagcaggatgcccagcagatgatcatttacgcctttgctgccgaactgacggaagcactgcgtgatgaggggcttaaacagcaggtgctggcccgaatcggtcaacggctgccaggaggtgcaagatgactttttccgtcgacaaagtgcgggccgactttccggtgctttctcgtgaggtgaacggtttgccgctggcttatctcgacagcgccgccagtgcgcagaaaccaagccaggtgattgacgccgaggctgagttttatcgtcacggctacgcggcggtgcatcgcggtattcataccttaagcgcccaggcgaccgagaaaatggagaacgtgcgcaagcgggcatcgctgtttattaatgcccgttcggcggaagagctggtgttcgtccgcggcacgacggaagggatcaatctggtcgccaatagttggggcaacagcaacgtgcgggcgggcgataacatcatcatcagtcagatggagcaccacgctaacattgttccctggcagatgctttgcgcacgcgttggcgcagagctgcgtgtgatccctctcaaccccgacggtacgctgcaactggagacgctgcctacgctgtttgatgagaaaactcgcctgctggcaattactcatgtctccaacgtgctgggaacagaaaatccgctggcggaaataatcacgcttgcgcaccagcatggcgcaaaagtgctggtggatggcgctcaggcggtgatgcatcatccggtggatgttcaggcgctggattgcgacttttacgtgttctccgggcataaactgtatggccccaccggaattggcattctttatgtgaaagaagccttgttgcaggagatgccgccgtgggaagggggcggttctatgatcgccaccgtcagcctgagtgaaggcactacctggaccaaagcaccatggcggtttgaagccggtacacccaataccgggggcattattggtcttggcgcggcgctggagtatgtttcggcgctggggcttaataacatagccgagtatgaacagaatctgatgcattatgcgctatcacagctggaatctgtaccggatctcactctctatggcccacaaaacaggcttggcgttattgcttttaatctcggtaaacaccacgcctatgatgttggcagttttctcgataattacggcattgctgtgcgtaccggacatcactgcgctatgccattaatggcctattacaacgtccctgcgatgtgtcgggcgtcgctggccatgtataacacccatgaagaagtggatcgtctggtgaccggcctgcaacgtattcaccgtttgctgggataacagggaggcactatggctttattgccggataaagaaaaattgctgcgtaattttttacgctgcgccaactgggaagagaaatatctctacattattgagctgggccagcgtctgactgaattacgcgacgaagaccgaagcccacaaaatagcattcagggctgccagagtcaggtgtggattgtcatgcgccagaatgcgcacggaattattgaattgcagggcgacagcgatgcggcgattgtgaaagggcttattgcggtagtctttattctctacgatcagatgacgccgcaggatattgtcagtttcgatgtgcgtccgtggtttgaaaaaatggcactcacccaacatctcaccccatctcgttcacaaggtctggaagcgatgattcgcgcaattcgcgccaaagccgctgcacttagctaaactaaagggacagctttcatccggttggctcacattgccggatggtcaatgtttacactgacctgcacaggagtgttttggtttcaggtgaacataagcgccatccgacgtttcagcgtgagtctccggcaaatacaggaggtttacaatgaaacgcgcgtctttgcttacactcacgcttatcggcgcttttagcgccatccaggctgcctgggcggttgattatccgctaccaccaaccggaagccgactggttgggcaaaatcaaacgtatacggtgcaagaaggggataaaaaccttcaggctattgcccgacgttttgatactgcggcaatgttgatccttgaagccaataacactatcgtcccggtgccaaaacctggtacgacgataactattccttcacaactgttattacctgatgcaccgcgtcaggggattatcgttaaccttgcagagctgcgcctttattattatccgccgggagaaaatattgtgcaggtttatccaataggtattggattgcaggggctggaaacgccggtgatggaaacgcgtgttgggcagaaaatccctaacccaacctggacgcctacggcaggcattcgtcagcgttcgctggagcgtggcattaaattaccgccagtcgttcctgccggaccaaataacccgctaggacgttacgcactgcgcctcgcgcatggtaatggcgaatacctcattcatggcaccagtgcgccggacagcgttggtttgcgcgtcagttcagggtgtattcgcatgaatgcaccggatattaaagccttgttctccagcgtgcggacgggaacgccggtgaaagtgatcaacgaaccggtgaaatattccgtggaacctaacgggatgcgttatgttgaagtacatcgaccactatcagcagaagaacagcaaaacgttcagacaatgccatacacactgccagcaggctttacgcaatttaaagacaataaggctgtagatcagaagttagtcgataaagcgttgtatcgtcgggcagggtatccggtttcggtgagcagtggagcaactcccgcagccagcaatgcgccttcagtagagtcagcgcagaatggtgaaccagagcaagggaatatgttacgcgcgacgcagtagtggtaaatagcagacaaaaaaatggcgcacaatgtgcgccatttttcacttcacaggtactattacttgcggtatttagtagccatgttgtccagacgctggttagcacgagctgcgtcatctttagcagcctgaacgtcggaacgcattgcgttcacgtcgttgctcagctggtcaactttagcgttcagagtctgaacgtcagaagacagctgatcgattttagcgttgctggagcaacctgccagcagagtagaacccaggattaccgcgcccagtaccagtttagtagctttcattattaataccctctagattgagttaatctccatgtagcgttacaagtattacacaaagttttttatgttgagaatatttttttgatgggaaggcacttatttttgatcgttcgctcaaagaagcatcgaacgctgggttttagataaaaaaactgagagaaaacaggatgcttccatcggattcatcttagataaagtgagattatatagtgaaatccgatttgattttttattgcttctggttatcgattaaataaaaaagcgcccatcagggcgcttcgatatacaaattaattcacaaaagcaatattacaggacgtgaacagatgcggtgttagtagtgccgctcggtaccagtgcaccagaaaccataactacgacgtcacctttgtgtgccagaccgctctgcagagccagttctttacccagacggtagaaatcatcagtagaagtgatctctttaaccagctgcggcacaacgcctttgctcagtaccaactgatgagccgttttttcgttggtggtcagtgccagtatggtggcatccgggaagtatttacgtactgcgcgagcagatttaccgccctgggtagcaaccacgatcagcggagcatccagtttttcagcagtttcaacggcaccacggcataccgcttcggtaatgcgcagtttacggttgtcattgttgaactcgagacggctgttcatcacgcggtcggtacgttcgcagatggtcgccatgatagaaaccgcttccagcgggtatttaccttttgcggattcaccagacagcatcactgcgtcagtaccgtcgaggatggcgtttgcaacgtcaccggcttctgcgcgagtcgggcgtgggtttttgatcatggaatccagcatctgggtcgcagtgataacgactttacgtgcacggatacatttttcgatcatcatcttctgggcgaagataacttcttctaccggaatttctacacccaggtcgccacgcgcaaccatgatgccgtcagaggcttcgaggatttcgtcgaagttgttgaggccttcctggttttcgattttggagatgatgtggatgttttcgccgccgtgcgctttcaggtgctcacggatttcgataacgtcagaacgcttacgaataaaggaagcagcaacaaagtctacgccttgttcgcaaccaaagatcaggtcctgtttgtctttttcagccagtgctggcagggcaatggaaacgccaggcaggttcacacctttgttttcgcccaggtcgccgttgttcagcactttacagataactttgttaccttcaatggcagtaacttccataccgatcagaccatcgtcaaccagtacggtgttgccaacagacaggtcagtagtgaaaccttcatacgttaccgcaaccatttcgctgttgccgataacagatttatcagtggtgaaagtaaaggtctgacccgctttcagagaaacgtcgttaccgccttccagtttcatggtgcggatttccggacctttggtatcaagcaggatagcggcggttttaccagttttgctcatcacgttgcgcagattctgaatgcgctgaccgtgttctgcatagtcaccatgagagaagttcagacgcataacgttcatgccagcgtccagcattttagctaacatctcttcagattcggttttcggtccgatggtgcaaacaattttggtctttttcatgacagtcttagtctttaagttgagaaggatgggagaaacttgctttctgggcgcactgccggaaagcgaatccggtattacgaaagtggtggtgccttgctctaaggataggtgacatcgaaaaagcgtgcagaggaatgtgtgcttgtgtctcagcccaacgtgagtgcctgtttttgagtcgttgagttctacagtccaaagtgctgaaaccattcaagagtcaattggcgcgcattatacgctgaaattaatccaaaaggaaaacaaaaacagcgtttcaaaaaatatacaacttgttagacaataaattgttatcaaagatttaacgttccagggaaaaggttacgcaaaaacttcgctgtttgcgcaacgtctggtgccgaagttgtcagtgtgaggataagtgaaagttcatccggtgtataaatatatcatcgctcaattgctacagttaaaataatttatcgcgttatttgtctgattttgtttgatttttgtttaattggttagattgatatatgctgatagttggcatgataaataggtataaagaatgggaaatcggacaaaagaggatgaactgtaccgagaaatgtgcagagttgtcggtaaagttgtgctggaaatgcgcgatctggggcaggaaccaaagcatattgttatcgcaggcgtattacgtactgcattagccaataaacgcattcagcgcagtgagctggaaaagcaggcgatggaaaccgtcattaacgcactggtaaaatgaccattcaggatgaggcggtaagcttcatcctgatattcttgcttcagttgcggtccagttaatcattctaaataacaactgctgaaattatacgaattgcggtatgtattttaatctataacgataatattatttttattttctgcaatgaacgtcacaaataattgtcgcttaagttaaatttatttcaattgataataaatatcagttcacttataatttcttgctttgtaattttaattgataacgatcaatgttaagggctcagaataatcacattattttttctcctaaccataaaggattggtttatcggcgttaaatcttttctcatacactatcgggttagggaaaatatctggtgttggggacagagtcagcagcgtattagttgaatgcttaatatcaggctgctgaattgtcagcactgtgtttgcgaagaggatgcgaaataaatgaacccggttgatcgtccactattagatattggcttaacgcgattagaattcttgcgtatatcaggaaaaggccttgctggtctaacaattgcccctgcgttactgtcacttttgggttgcaaacaggaagatattgatagcggcacagtagggttgataaatacacccaaaggggtgctggtgacccagcgagcgcgatgcacgggttgccaccgctgtgaaatctcttgtaccaacttcaacgatggctcagtagggacattcttctcccgtatcaaaatccatcgcaattatttctttggcgacaacggggttggctctggcggcggcctgtatggcgatctcaactataccgcggacacctgccgtcaatgcaaagagccgcaatgcatgaacgtctgcccgattggtgcgattacctggcagcagaaagaaggctgtattaccgtcgatcataaacgctgtattggctgtagcgcctgtactacggcatgcccgtggatgatggccaccgtaaataccgaaagtaaaaaatcctcgaaatgtgtgttatgcggtgaatgcgcaaacgcctgcccaacaggggcgttaaaaattatcgagtggaaagatattactgtgtgaatcttgcaaaggaaaaaatcatggctaacggttggacaggtaatatattaagagtcaatctcacgacaggaaatattaccctcgaagattccagtaagtttaaaagttttgtcggtggcatgggcttcggctacaaaattatgtatgacgaagtaccgccaggcacgaaacctttcgatgaagcgaataaattagtctttgctaccggcccattaactggatctggtgccccctgtagttctcgcgtaaatatcacctcactttctacttttaccaaaggaaatttagtcgtcgatgcccatatgggtggcttttttgcagcgcaaatgaaattcgctggatacgacgtcattattatcgaagggaaggcgaaatcaccggtatggctgaagattaaagatgacaaagttagcctggaaaaagccgatttcttatggggaaaagggacgcgcgcaacgacggaagaaatttgtcgattgaccagtccggaaacctgtgtggcggctattggtcaggctggggaaaaccttgttcctctctctggcatgttgaatagccgtaaccacagcggcggtgcgggaactggcgcaataatgggttcgaaaaacctgaaagcgattgcggttgaagggacgaaaggggtcaacattgccgatcgtcaggagatgaagcgtctcaacgattacatgatgactgaacttattggtgcgaataacaaccatgtcgtgccaagtacgccgcaatcgtgggcagagtattcagatcccaagtcacgttggacagcacgtaaagggctgttttggggcgcggctgaaggtggtccgattgaaacgggggaaattccgccaggcaatcagaacacggtcggctttcgtacctataaatccgtttttgacttaggtccggcggcagagaaatacacagtaaaaatgagtggctgccactcttgcccgatccgttgtatgacccaaatgaatattcctcgggtgaaagagtttggcgtgcccagcacaggtggtaacacttgtgtagccaactttgtccataccaccatcttcccgaacggtccgaaagattttgaagataaagacgatggtcgtgtgattggtaacctggtgggtctgaatctgttcgatgactacggcctatggtgtaactacgggcagttgcatcgcgactttacctattgttacagcaaaggtgtgttcaagcgtgttctgcctgctgaagagtatgcggaaattcgctgggatcaactggaagcgggtgacgttaacttcattaaagatttttactaccgtctggcgcatcgtgtgggtgagctgagtcacctggctgatggttcatatgccatcgcagaacgctggaatttgggtgaagagtactggggctacgcgaaaaataaactctggtcgccgtttggctatccggttcaccatgccaatgaagcgtcagcgcaggtcggttccattgttaactgtatgttcaaccgtgactgcatgacgcatacccatatcaactttattggttccggcttgccattgaaactgcaacgtgaagtggcgaaagaactttttggttctgaagatgcttacgatgaaaccaaaaactacacgccaatcaatgacgcaaaaattaaatatgcaaagtggtcgctgttgcgggtctgtttgcataacgccgtcaccctgtgcaactgggtctggccaatgaccgtttcgccgctgaaaagccgtaattaccggggcgatctggcgcttgaagccaaattcttcaaagcgatcaccggcgaagagatgactcaggaaaaattagatttagctgcagagcgtatctttacgttgcatcgtgcctacacggtaaaactgatgcaaaccaaagatatgcgtaatgaacacgatcttatctgttcctgggttttcgacaaggatccgcagatcccggtctttactgaaggtactgacaaaatggatcgtgacgatatgcatgcttcgctcacgatgttctacaaagaaatgggctgggacccacagcttggttgtccaacccgcgaaacattgcagcgtctggggctggaagatattgccgccgatctggcagcacacaatctactgcctgcgtaaggaatgggtaagatgaaccatcaggatgaattgccgttagcgaaagtcagcgaagttgacgaggcgaagcggcaatggttgcaggggatgcgtcaccccgttgatacggtaaccgaaccggaacctgctgaaatcctggctgagttcattcgccagcattctgcggctgggcagctggtggcgcgcaccgtgtttctctcgccaccctattcggttgcagaagaggaactgtcagttttgctggaaagcattaagcagaacggagactacgcggatatcgcttgtatgacgggaagtcaggatgattactattactcaacgcaggccatgagtgaaaactacgcggcgatgtctttgcaagttgtggagcaggacatttgtcgcgccattgcacacgccgttcgttttgagtgccagacgtatcctcgtccttacaaagtcgccatgctgatgcaagcgccatattacttccaggaagcgcagattgaagccgcgatcgccgcgatggatgttgcacctgaatatgccgatatacggcaggtggagtcatcgacggcggtgttgtacttgtttagcgagcgatttatgacctatggcaaggcttatggcttatgcgaatggttcgaggtagagcagtttcagaacccctgaaatttcagggagatgtcatggatagggtggacagttgcagccactgcattaggggataatcagatgtccttcactcgacgcaaatttgttctggggatgggaacagtaatcttttttactggttctgcgtcttctctgttagcgaacacgaggcaagaaaaggaagttcggtatgccatgattcatgacgagtcacggtgcaatggctgtaatatttgcgcccgcgcatgccgtaaaactaaccacgtccccgctcagggaagccgtttatcgatagcacacattccagtcaccgataacgacaacgaaacgcagtatcacttttttcgccagtcatgtcagcactgcgaagatgctccgtgcatcgacgtatgcccgacaggggcgtcgtggcgtgatgagcaggggatcgtgcgggtagaaaaatcgcagtgcatcggctgcagttattgcattggcgcttgtccgtaccaggttcgctaccttaaccctgtcactaaagtggcagataaatgtgatttctgcgctgagtcccgactggcaaaaggctttccgcccatttgcgtcagcgcctgtccggaacacgcattgatctttggtcgcgaagatagcccagaaattcaggcgtggttgcaggaaaataaatactatcaatatcagctacttggtgccgggaaaccgcatctgtatcgccggttcggtcaacatttgattaaaaaggaaaatgtatgaacccgtcgcaacatgctgaacagtttcagagccagttagcgaactatgtgccacagttcactcccgaattttggccggtgtggttgatcattgccggagtattgctggttgggatgtggttggtgttggggctgcacgccttgcttcgtgctcgtggcgtgaagaaatcagccaccgatcatggtgagaaggtttatctttacagcaaagcggtcagattatggcactggtcgaatgcgttactctttgtattgttgctggcaagtgggctgataaatcactttgcgatggtgggcgcaactgcggttaaaagtctggttgcggtgcatgaagtttgcggatttttgttactggcatgctggctcggctttgtgctgatcaatgccgttggggataatggtcaccactatcgcattcgtcgtcaggggtggctggaacgagcggcaaaacaaacacgattttatttgtttggcattatgcagggggaagaacatcctttcccggcaacaacacagtctaaatttaatcccttacagcaggtcgcctatgttggtgtcatgtgtggattgctgccgttgttactattgacggggctgttgtgtctctatccgcaagccgtgggagatgtgtttcctggcgtaagatactggttattgcaggcgcattttgctctggcatttataagcctcttttttatcttcggacatctttatctttgcaccacggggcgtacgccacacgaaacctttaaaagcatggtcgatggctatcaccggcactaacgaatgatcattacacgagcagacctgcgagaatggcgtatcggagcggtgatgtatcgctggttcctgcgccatttcccacgcggcggtagttatgccgatattcatcatgcactgattgaggaaggatatacggactgggcggagagtctggttgagtatgcgtggaaaaaatggctggcggatgaaaacttcgcgcatcaggaagtttcctctatgcaaaaactggccacagaccccggagagataccattttgcagtcagtttgcccgcagcgacgatcatgctcgcatcggctgttgtgaggataacgcccgaatcgtaaccgctgggtatgccgcgcaaattgccagtatgggttatagcgtgcggattggaagtgtcggctttaacagtcacattggcagctccggtgaacgcgcacgggttgctgtaaccggtaattcttcgcggataagcagcgctggagatagtagtcggattgcgaataccggaatgcgagtacgcgtttgtacattgggtgaacggtgtcatgtcgccagtaatggtgacctggtgcaaatcgccagctttggcgcaaacgccagaattgccaacagcggcgacaatgtacacatcattgccagcggtgaaaattcaacggtagtgagcacgggcgtggtcgactcaattattctcgggccagggggaagcgccgcactggcatatcatgacggcgaaagagttcgcttcgccgtcgccattgaaggtgaaaacaatattcgaaccggagtccgctatcgtcttaatgaacagcatcagtttgttgagtgctgatagctttacctttaatcaaacgaaagacgccgacgagcacgggatgcaggctttacgaccgcccgagccatcgcctcaccaatttctgcacatgccgtaagtccctgaacgaaaggctggtcgtgcatcaaccagggcaacgcgccgaacgctacgcgtccacgaatatcttcgggttgctgtaacgtataatcttcgccaacatcagggatttcatcccctgttttctgtaattgctcgcgtagcccagggaaaggaatatctttcactttaagcggacgctgtccgcgggcatcaataaaaacgtcaaacgagtagctgttgtcttccgttttcaggacggtgcgcgactcattaatttccattttgtagtcttcaccgagggcgagaatatgaatgatccccgcttcacgtaaggccagcagccgacgaatagactctgaagggattgccgcataattatcgatgaaaacccgggcaaggcctttactgaaccgtttatggtcgtgttcattcagatgtggaacaatttcctgtacggcttcatgcaggcgcagaatgacataacgccagggaacagtatgtttttctcgtttattgcgttcgacttcctggagatttttttctgcccagtcaaatgggtcgcgttgtttgcgctcggcaaaccaggcttgagcaaaggaatcgacattcaggctctctaaggctatgcgttggctccagtctggatcagcaaacttgatttcctctactatcaatctaaatacccgatccaaaaggccatattcgcctttttgaatctcagcatttaatgcctgatcggtgacgatgtgtaagggctcgtagggaatagggcaatagaaatcggcttcgggtaaaatacccgtgcgcgacatcaacgtgatatttagcttttcacttgcgttatcgcggtgaaaaacgacgtgttgtttatcatcttcaatgaacgaaccatgctgaatagccactgccattgccgcatccagtccgctcaaggatgttcccataatacccacgttacacgcatcgacctttgcttccatcaggcctgaccacgggctgggaaaatacgttctggttgcttcttcttcatcaggccagacgtgacccgtggcaatcaccgctaaatcaaacgtctcgctgggtaaatcctgatttgtagcgagcatgacgccagcatttgtaatttgcagatcggtaacctggcatgattcataaacagccactgcaaatttttgctgtcgtgcctggtctactaatcgtaaaaattgatcgcggaaatattcgcccagcagaattcgcggtaaaaactgacgatcgtgcaaggtttcttttttaacgccataacgctggagatggctggcttcttgcttttgtagccattcgagatacgtacaattaatcggcggtatttcaatactggcaatatttgccagcatcatttttgagttttcctcatcactgtatggcatcccgacaccggcctcgtcagcctgctcgaagatagaaatagaaagtggagtttgttgctgtagaagcgagaataaggtgtagatccccgtaggcccggcacccacaatagcaatttttttcattgttacttacctgtacgcattctttcgaatttagtgttatcagataagtttggttgagatttttagaatttgagaaatttcagacagggatgaaaagggcgctaaccgcccttgattaaattctgtcaggcgagttttgcctgattgatttgactaagtggctcattgacatcgaaaactttggcgacaacttcctcaacgccgagatttttcagtcgggcagtatgtttttccagataggcaagggcgcttttttcatcagtgaaaaggtagatcccaccggcttcgtggttcttttcactttctgtccataccttccacagaaaaccaggttcctgattaatcgactcagcaagtggtttaagctgctcagccattgcgtcgccaaatgggccattaaaagcaaaatgaagttgtaacaaagttgccatagcgattctccttctgataacgcatacgaagacagtgtaaatcttttaacgtattggatacagagaataaacagagggaaaaaggaaaagaccagattaagaaaatctggtgcgtccgagtggactcgaaccaccgacccccaccatgtcaaggtggtgctctaaccaactgagctacggacgcaggatggtgcgttcaattggactcgaaccaacgacccccaccatgtcaaggtggtgctctaaccaactgagctatgaacgcaacgttgtaggtgacaacggggacaaatattagcggcagagtggaaaggtggcaagaggcaaaacgtaattttctgcgctatttcgaccgtttgcagagcttttaagcaaattggctatattttgttgatttgcaagggcgatttttattcaggatcgcatttacatctgatacaacccaataattcgtgtatcagagtttaaacagaattgtttgccaccatctcaaatctgtcgtggataaatcctccgtagcctttacacttaggtagcaataaaggcacacagatgcagcaaaggaataaatcatgggatctgatgcgaaaaacttgatgagcgacgggaatgtgcaaattgttaagaccggcgaggtcattggcgcgacgcaacttactgaaggcgagttgattgttgaagctggcggaagagccgaaaataccgtggtcacgggggctggctggttgaaagtggcaaccggtgggatcgccaaatgcacacagtacggtaacaatggcacgctatcggtcagcgacggtgccattgccacagatattgttcagtccgagggaggcgcaattagtctctctacgctcgctacggttaatggccgccatcccgaaggtgaattcagcgttgatcagggttatgcctgcggtttgttgctggaaaatggcggtaacctgcgtgtactggaaggacatcgcgcggaaaaaatcattctcgatcaagagggcggcctgttggttaatgggacaacctcagcggtcgtggtagatgaaggtggtgaattgttggtgtatccaagtggagaagccagcaattgtgagattaatcagggcggcgtttttatgctggccgggaaagccagtgatacgttgcttgctggtggcaccatgaataatctcggtggtgaagactctgacactattgttgagaatggatccatttatcgtctggggacggatggccttcagctctacagttccggtaagacgcaaaacctgtcggtgaatgtgggggggcgggctgaagtgcatgccggtacgctggaaaatgcggtaatacaaggtggaacagtgatcctgttgtcacccaccagcgcggacgaaaattttgtcgtagaggaagatcgcgcaccggttgaactgaccgggagtgttgcattactggacggcgcttcaatgattattggttatggcgcagagctgcaacaatcaacgattactgtacagcagggcggtgtgttgattctcgacggcagtacggtaaaaggtgacagcgtcactttcattgttggtaacatcaatctgaatggcggaaaactgtggctgatcactggtgcggcaacgcatgtgcaactgaaagtgaaacgcctgcgcggagagggagcgatttgcctgcaaaccagtgcgaaagaaatttcacctgacttcatcaatgtgaaaggggaagttaacggggatatacgcgttgagataacagatgccagtcggcaaactctgtgtaacgctctgaaattacagccagacgaagacgggattggcgcaacgctccagcctgcgtaaaaacacaggcgcaacccgtgaaggttgcgccttgtctttattagcgggacgctcgttgcagaatgatggctgacggcatacgttgcaggaaccgcatacgcagcatcatcataatggctgccgatgtcaggccgataataaagcctatccagaagcctgctggccccataggttcaacgaccagatcggtcagtgccagaatatagccgcttggcaagcccagcacccagtaagctgtaaaggtgatatagaaaatggaacgcgtatctttataaccacgcaaaatcccactgccaatcacctggattgagtcagaaatctgatataccgccgccagcaacatcaaatgcgcagccagcgttacaacctcgggattgtcgttgtacaacagggcgatttgctcccgcagtgaaaccgtgaaaatggccgtcagggttgccatacagacacccaccataagcccggtccgagcagcggtttgcgcatccagcgttgagccctgacccagacgataacctacgcggatagttaccgctgccgccagcgacattggaagcacgaacattagtgaactaaagttcagggcaatctggtgtcctgcgacatcaacaataccgagcggagacactaacagagccacgacggcaaacagtgtcacttcaaagaatagtgccagcgcaatcggcaaaccgagttgaatcagtcgtttcataaccgcaggatcgggttttgcggtgccttttttgttacggatatcgcgcatggagcgggcgcgtttaatgtaagaaaccatggcaaggaacataacccaatacaccgccgcagtagccacgccacaaccaacgccaccgagctcaggcataccgaaatgaccataaataaagatatagttcaccggaatgttcaccagcaggccgataaagcccattaccatacccggcttggtttttgccagaccttcacactggttacgggcaacctggaagaaaagatagcctggcgcgccccacaacaacgcacgcagataacccacggctttgtccgccagagccggatcgatgttttccatggagcggataatgtaacctgcattccacagcaccagcataatgagaacggaaacaaaacctgccagccagaaaccttgtcgcacctgatgcgcaatgcgctcacgtcgaccggaaccatttaattgcgcgataaccggcgttaatgccagcagcagtccgtgaccaaagaggatcgccggaagccagatagaagtaccgatagcgaccgccgccatgtcggtggcactatagccgcccgccatcacggtatcgacaaaacccatcgcagtttgggcgatttgcgcgagaatcaccgggattgctaatgctaataacagacgcgcttcactgatatacttctgcacgtgaacaccttttatttgtagttatatgagagactaaaaagccgcctgaatgggcagcaaaaagaagaagcaggggaaattcagtctattgtagcgaggatttattaattctccagtgaaaaaatagtcattcttaccccttcactggtaagggcgttttccacctgctattgtgctgaacagaatgtcttaactgatttcaggagttgtaagtatgtttacggggattgtacagggcaccgcaaaactggtgtcgattgacgagaaaccaaattttcgtacgcatgtggtggagttacccgaccacatgctggacggcctggaaacaggtgcttccgtggcgcataacggttgctgcctgaccgtgacggaaattaacggcaaccatgtcagttttgacctgatgaaagaaacgttacgcattaccaatcttggcgatttaaaagtgggggattgggtaaacgttgagcgtgcggcaaaattcagcgatgaaattggcggacacttaatgtcaggtcatattatgaccaccgctgaagtggcgaaaatattaacctcggaaaataatcgccagatctggtttaaagtccaggatagtcagttgatgaaatatatcctgtacaaaggatttattggcatcgacggtattagcctgaccgtcggcgaagtcacgccaacgcgtttttgcgtccatttaattccggaaactctggaacgcacgactcttgggaagaaaaaactcggcgcacgcgtcaacattgaaattgatccacaaactcaggcagtggtagatacggtagaacgtgtgctggcggcacgagaaaatgccatgaatcaaccaggtacagaagcctgatctgaaatcgcccccggagagggggcgatagaatagcctttagcgagcgactcgaaggccgttttcaacaccgcgtgagaacacgacctgccagagctgaatatcacgggcgcggaaagcacctgcgcaggcattcagataataggtaaacatccgtttaaagcgttcactgtagttatccgcaatttctggccatgcggcgaggaatcgttcataccacgccatcaacgtagtatcgtaatcagcaccgaagttatgccagtcttccatcacaaagtggggttcgctggactgagcaatctggcgtacagagggcaggcaaccgttcggaaaaatatatttattaatccagggatcaacattcagatcggtttttttcgaaccgatagtatggagcaggaatatgccttccggtttcaaattacgatccaccaccgcaaaataggtatcgtaatttttcggtccgacgtgctcgaacatccccacagaaacaatacgatcaaactggtcgttcaggtcacgataatcttgcagcaaaatggtgacatccaggccttcacagcgttcctgagccattttttgctgttcggcagaaatggtgacgcccaccacgcttacgtcataattagatgccatgtagtgtgccagtccgccccagccgcagccaatatccagtacgcgcatcccaggttttaactgcaatttttcacaaatcattttgagcttcgcctgctgggcagattccagattatcggcatctttccagtaagcgcaggaatattgcatgaagggatcaagcatgcggctgaacaagtcattacccaaatcgtaatgctccttgccgactatccaggcacgttttttactctgcagattgaagagacgagcgccggcaatacgcagcgtgtctttgaaatgatgggggagttggttctcgagacctgcgcgtaagactttgctaaaaaacatatccagtcggtcacattcccaccagccatccatataactttcgcctaaccccaaagagccttcttgcagaacgcgtttaaaaaaatcggggtttttcacacgaatatccgccggggcagaaccgttaatggctataccggcacggctaagtaattcgttggcgatacggtaccagttgtcatccggtacactgacttcttctatacacgatgaactcatagtttctccatcactggtcggtgatcagaaccttaaaacagcgtagacgctttttgggctttgtgagaaatctcgcagaaaaaaccgcgagtctataatccgacgtagaacagagggaaaggaggaacccttgccgaaatgaccatccatagtgagtcgggaacgatcctgtccccgtaaaaacataatatttatcgtagctttaacaactcgaaattagtataggccgctaatttcaatcatacaacaaaattttgttagcagcctaagtataagtatatcgatatagatcagtgtgattcgctatgagcgacttcggcattgccatgattctggcagccagcttcttcacaacgttgcatcatgtaacccagcgcgaccagcactactgttgataacatcacgctggtggtggtgagcaatggcgtgctgatactaataagccaggaaactaccagacttgcgaggaagcacagacccagttgtagagtgttctgcaacgctgcggcgcgaccagttgcgtgtgggaagggacgcagcgcctgggcgacaacaatagggtagatcgcgccattggcaatcgccatcacacagaatgggatcaggatttcgaccagcgacacatggctaatgaagcccgcagcccaggtcgcaatgacgctgacagcaaacagcaccagcaaccacggtaataactgcttgccttgccatttctgcagcgcggcgcgacagccataaccaccaatcagaaacgcgatagtttgcgggacataacttaaaccaataactgccgggctgtagcccatttcactaaggatgaacggtgaaccggtcagccatgcaaaaaaactggctgaacaggccgcgtatatcagcacgttgccgcgataggttttagaacgtagcaggtcggtaaaggtcagaccatcctgactattgttacgggccttcgtcgtgggtttgagccagaaaataggcagaatcagcaccacggtaatggcaaacagggtggcgaaaatcgcctgccaggaaaaatggaccagcagccagcttcctaacagaggagccagggccggagatagacccaccagcggtatgatggtcgcaaaaattcggttaactttctgtgaaggataataatccgtcactaacgcttgccagataaccgccgcggcgcagacacccacagcctgtacaaaacgcaataccagcagcgtagcggcgttttctacccacagcatccccagactacctaacgcaaaaattgtcataccgattaataataccggtttacgaccataacggtcggagagcggcccccacagaagctgggctgcggcaaaaccggcaaggaacagactaaggctggcactgacagcagacgcaggcgtttgcaggtcggcctgtatggcggcgaaagcaggcagatacatatcggttgccagaaaaccgagtacgctcaaacccgccagccagactaaaaatcttttcccaggttgcatgtatattctctaaatctctcaattaaacaccgccgcaaagtgtagggagtgaaattagtgttgtgaaacggtaatatttgatgattggtttcaaaaattttgcaggcagactatgtggtcagaatattcactcgaagttgttgatgcggtagcgcgtaatggtagttttagcgctgcggcacaggagctgcatcgcgttccttctgcggtcagctataccgtgcgtcagctggaagagtggctggcggtgccgctctttgaacgacggcaccgtgatgtggagctgaccgctgctggagcgtggtttctcaaagaagggcgctctgttgtcaaaaaaatgcagatcacccgccagcaatgtcagcagatagcgaacggctggcgcggtcagttagctatcgcagtggataatattgtcaggccagaacgtacacggcagatgatcgttgatttttatcgccattttgatgatgttgaacttcttgtctttcaggaagtgttcaacggtgtctgggatgcgctttccgacgggcgcgtggaactggcgattggcgcaacacgcgcgattccggtaggcggtcgttatgccttccgggatatggggatgctaagctggagttgcgttgttgccagccatcacccgctggcgttgatggatggcccgttcagcgatgatacgttgcgcaactggccgtcgttggtgcgcgaagacacctcgcgaacgctacctaaacgtattacctggttgctggataaccaaaaaagagttgtcgtgcctgactgggaatcatcggcaacctgtatctcggcaggattatgcatagggatggtgccaacacatttcgccaaaccgtggcttaatgaggggaagtgggtagcacttgaactggaaaacccctttccggattcggcatgttgtctgacatggcagcaaaatgatatgtcgcctgcgttaacctggttgcttgagtatctcggcgatagtgagacgctgaataaggagtggctgcgggagccggaagagactcccgcaacgggtgattaacgacgatagtcgcggaacgggccgtcagccacggagcggcgttcaatcaagcgcggatgcacttcaatggactgcggttcttcacgtttgttgacgatacgatccaacagcatgttgaacgctgtttcacccagcgaatcttttggctgatggattgtggtcagcgccggcgtaaaatagcgggcgttgcgcacgttatcataaccaattagcgaaacatcctgcgggacgcgcagccccatttcatcagcagcacaaagtgcgcccattgccatgatatcgccaccacagaagacggcagtagggcgatgcggctgcgacaggatttgctgcatggcgcgataaccggattcaggttcaaagtcaccctgcacaatccagctttccggcaccttgatcattgcttcttccatcgccttcataaaaccgacaaggcggcctgcgccagtgttacgttccagcgggccggggataacgccgatttcgcggtgaccgcgttcaatcagataacgcccggccatgtagccgccttcgaacgcgttatcaatgaccgcatcggtgaagtcagcttttgcttcaccccagtccatcaccaccattgggatatggcgatactcttccagcatcgccagcaacggctctgggtactcagaacacatcaccagcagaccatcgacgcgtttttgcgccatcatcgacagataagcccgctgtttctcaagattgttccacgcattgcccagaatcagggtataacctttctggaagcaatttttttcaactgcttcaatgatctcggcaaaataggccgcttcgctgctggtcgccagcaaaccgatagacttggtgtggttaaccttcaggctacgcgccaccgcgctaggggagtagtgtaattctttaatcgctgcccacacggcgttgcgcgtttcttcagcgacgaaacgtgttttgttgatcacgtgtgacacagttgtagtggaaacgtttgctcgtttcgctacatcttttattgttgccattccatttcactccagaccctaacttcagctcctgcaaaatcgcaaggtaaacgtttgcctttacacaccttacgcacaacaaaagtgttgcggtacgccggaaaaacgacacggagcgtcaggaaggggtcaatggccagtacgcaaatagtgtaagcgtggaattttggccgatcttgacgaaaaggggaagtggtaaaaacacttatcattataaatgacgggagattttttcatcacagtgtgtaaaaatgcgtaatatcactttttgtgtggtaataaaaaaggagaaaacttgatgagcaccgaccttaaattttcactggtaacaacgattatcgtcctcggtttgatcgtagccgtgggtttgactgccgcgctgcactgatttcctctcgagggagcgcgttctccctcgcatctccttcctgtttgttagcaaaatggcaaaagtgctttctctttttgttattttcatttttttgtgattgctgtcatgctttcgccactttaatgaatatcgcgtaatgacgcgaagaggtggagataaggcatgaaaattaactatccgttgctggcgctggcgattggcgcgtttggtatcgggacaacggagttctcgccaatgggcttgttgcccgtcattgcgcgcggtgtggatgtctcgattcccgctgccggaatgttaatcagtgcctatgcagttggcgtaatggtgggcgcgccgctgatgacgcttctactttctcatcgtgcccgccgcagtgcgttgattttcctgatggcaattttcacgctcggcaacgtactttccgccatcgcgccggattatatgaccctgatgctttcacgcattttgaccagcctgaatcacggagcattttttggtttgggttcagtcgtggccgcaagcgtggtgccaaaacataaacaggccagcgcagttgccactatgtttatggggttaaccctggcaaatatcggtggcgtgccggcggcgacctggttgggtgaaaccatcggctggcggatgtcatttctggcaacggcggggctgggagtgatttcaatggtaagtctgttcttctcattacctaaaggtggtacaggggcacgacctgaagtgaaaaaagagctggcggtattaatgcgtccgcaggtgctgtctgcattgctgacgacggtactgggagctggcgcaatgtttactctctacacctatatctctccggtactgcaaagtattacccacgcaacaccggtgttcgtcacggcaatgctggtgctgattggtgtcggattctctatcggtaactatctcggcggcaaactggcagatcgttcagttaacggcacgttgaaaggctttttgttgctgctgatggtgattatgctggcaaccccgttcctggcccgcaatgagttcggcgcagctattagcatggtggtgtggggcgcagcaacctttgcggtcgtaccgccgttacagatgcgcgtgatgcgtgtcgccagtgaagcgccaggtctgtcttcatcagtcaatattggtgcctttaatcttggaaatgcgctgggagcagcggctggtggtgcggtaatttccgctgggctgggatacagctttgtgccggtgatgggggcgattgtcgcgggactggcattattgctggtgtttatgtcagccagaaaacaacctgaaacagtttgcgttgccaacagctaattaaacaaaaacgcagaaggataaccttctgcgttacagttgctgacaacgtgcgatttatcttgccgaatgcgctgttaacgcctcatccgcgttggcatggtaagcgaagcgcatcaggcaatgctgcatttgccatcagttattatgcagcgagatttttcgctacgaattcccagttcaccagcgcccagaagtgctccagatagccaggacgtgcattgcgatagtcgatgtaataagcgtgttcccagacatcaacggtcagcagcggagtcgcatcggtggtcagcggagtacccgcgttagaggttgaaacgatagccagtttgccatcgctgtttttcaccagccaggtccagccagaaccaaagtttttgatcgctgcatcagtaaactgcgctttgaaatcggcaaagctgccaaaagatgcggcgatagcttcagcgacttttccagtcggttcgccaccggcgttcggtgccaggcagttccagtagaaagtatggttccagacctgagctgcgttgttgaatacgccaccttcagagctgcgaataatctcttccagtgatttaccttcaaacgcggtacctttaatcaggttgttcaggttagtgacataagtctgatgatgcttgccgtagtgatactcgatagtttccgcagaaatgtgcggtgccagagcatctttagcatatggtagtgcaggtaattcgaatgacattgctactctcctttattattaatttgcatacgtacaatagccttattgtgcgtatggatagggtagcaaattaaaaggtgagacaaaagatgaacttaccctgttgccgtaacaacagggtaaagttttagcgaagtgtttttggggtcattacccgacgagcgccaacatagtggcgctgccagtagtcttcactgagagaagtgatttgaatttcctgacctgtgcgcggtgactgaataaatttgccgttgccgacatacacgccgacatgatcggctgtgccgcgtccctgagtacggaaaaagaccaggtcgccgtttttcagttcactacgttcgattggcgctgcatcacgcaggtgatacatttcattcgccgtacgcggaatacgaattttcaccaaatctttataagcgtaataaaccaggccgctgcaatcaaaaccggtacgcggtgagctgccaccccaacgatatggcttaccaatttgctgcatcagtttattcattgccactttcgtagctttttgcaccttcgctttgtgcgcgtcggcaagagttcctgacgcggcatttttgactttcacacaatgcgatttatagcccttacgtttggtacacttttcggtaaagctggctgaggccgttttattgacggcgtgtttgctgcgagttttggcgtttttagaagcggtaatggaagattttttaacggaagaagcggttttgcttttggtcgtacttttactggcggcttttttcgctgttttctgggtctttttggtggttgccgtgcttttctttttatctgcttttttggtgatatgagtggtagcagaactctccctggcttgctttgaagcatgggccataggcgttaaaggcagggtggtaaaaagtaaagcacagagcgtgatcgaaatacggtttatccgcgccactgagcgtccctctgttaaggcaggtctatcatgcctgcgtctgatttacaaaacttgatgattctaatgcatagaagaagagaaagttaatagcttttattgttaaaaaatacgtttcgttggcgagcgcaaaaaaatgcagcagtgaaagctaaaaatggttataaatacgccagtttgccggcatcagagaagaaacgaatatttgaaatgcaacaaatagagcaaagggataaaatagcaaaagcgtgatgaaaatgttattttccgatgccgcactgacccgctacaatgtcagattactgccgtaaagaagtttgaggaagcaagacaatgagcaccactatcgaaaaaatccaacgccagattgctgaaaacccgatcctgctgtacatgaaaggttcaccgaaactgccgagctgcggtttctctgcccaggcagtccaggcgcttgccgcatgtggcgaacgttttgcctatgttgatattctgcagaatccggacattcgtgcggaactgccgaaatatgctaactggccgaccttcccgcaactgtgggttgacggcaagctggtcggcggttgtgatatcgtgatcgaaatgtatcagcgtggcgaactgcagcagctgatcaaagaaactgccgctaaatacaagtctgaagagccggacgcggaataatccgtcctgcaatactgacggatgcgaacgggcatccgtcagtcctttctctatccccaatccagcccttgtggcgaacttgaaaatcccgcctcacgcagcagcgtaaacatcggcgtttgccggaccggtagatcattcacttctgttagcgtaaagcgcagccgtggttcgcgacgcagtgcggtagtcagcgcgtggaaaacctctggggcgagtaattcctctttttcctgccagaccagcatttttttgccaccttgcgccagatagagtaacaatttgccgccagaaacgaccaccagcgcacccgcccgacgcgttggaaccagcgttgccggatgtgcaggccagggcagaagatttccccacacattagccggatcgttggcagagagcgccactggtgtatagtggcgcgtttgcgtggcttgtgtcgccagatcgcgcaatcggtcaatagtcagacgttcagcgaattgcgcgccacccagaccttctacaaaacgacctcgcataattcgcccggagtcttccatacttcgacaaagcgtttgcatcgatggaaacccgccagggatattttcggctatcaccgcctgacgactgatgatgccgtagcggtcgagcatattttccgccagcgccagcatccagccagatttggtgtgttgtaagataccagcggcgagacgggttgcgcatagacaggacgtccacgacgagcccggtgactgcggcgagttgaggtgcgtgcgttggaactgctgcgggtgagggcgcgtaacggtgcccaaatgtcgctggtgatgacgccttgccagaccagcgcccataacgcctcttgcagggcagagagatcaaccgattcgccgattttgtcgcgtatccgttggctgatttgttgtgcaaaccaggctcctccgtcagccagaacagcgactatcgcttgttgcagcgccgaacgattcgcctgatccgcttcgtcgggagtgaacgattctgcagcatattcctgtagatgcagtgccaccaggccgtcatcttcacccagtttttttgccccgaccagataaccgcaccggttgccagtaattcatcgagcatttctgacgaatagtcgcgtacgcgggcaggcaggatctggctttcccagagtgaggcgggtaaaccgactccggcaagctgttcgatcacccgcatcacgccatctacgccctcataaacgcctggcgatgttgaggcaaagagcgccgggctaccatcggtggcgggtaatacgccctgacgttccagcagcaatcgcgcataggtcgtggctgcaacgggacgcgtcgcttctctggcggcttgcagcgagcgcaaacgcagacgacgaaatacttcatcgctcacccagatgtcttgttgcagattcatcaccagaccctgttcacgcagttgctgaagctgctcttcgacaatggcaataccgagactaaactcatgagccagttgttcagccgtgaccagagcatgagcccggagatagcgcagaaagaggtcgcgaagcgggtaactgactctatgtaaataaatctctggcaatgactctggtagtcgtacgccgagggcatcacgcagcctggcggcatcatccatacaggcaagacgctcctgtccgctaatcatcgctgggaagattcgttttactgcaagaagattttccagatacgacgcaacctcttcactgctgcctgtatgccgttgcgccaggtcttcaacggtcattggccccagttcgcgcagcaggtcgaacaatccttcttcacctttcgctcttctgccaggagccagtcgttgcaactcttcttccacctggcgaatgacctgcgggtcgagtaattcccccggatcgacctgtccgagtagattgcgcagtaactcgctgtccagcgacagtacggatgcccggcgctctgccagcggggcgtcgctctggtacataaattccgcgacatagccgaacaataaacttgtggcgaaaggcgagggcgtagtggtcgttacatcggatatttgaatttcgccaccgttcaggcgacgcatcaaacgttccagtgcgggaagatcataaacatcttgcagacattcgcgtagggtttcgagaatgaccggaaaatccggatatccctgagcgatttccagcaactgactggcgcgcagccgttgttgccaaagcggggtgcgatggcccggagtgcgccccggcattaataatgcccgcgcggcgcattcgcgaaaacgggcggcgaaaagtgccgagctgcctaccgcctcgcggacaatttgcagcaacttttctggttcaaacaaaaaaatcgcggcgtcgggcaatttaccatcagtgtcaggaatgcgcgcaacaatgccgtcatcactggcgaccacagacgcgtcagcgccccatagggcatgtattcgcccggcaatcgccagcgcccagggttcatgcacccgtcttccatagggagagtgcaaaataatacgccagtcgccaatttcatcacggcaccgttcgaggaccagatggcgactccccggaacgatgcccgtcgcgttgcgttgctcgtcaatcaacccctgaatattggcgatcgtattttcttctgccagccacgggggaatagtcccggaaaagaacgcgccatccgccagcaaatgaagaaaatcgccgatcatctcgcctaattcagccggacgtccgttaccttcaccacgccagaaggggagccgggcagaacgacccggagcaggagtcacaatcacctgatcgcgggtgatttgctggatccgccatgaggtagcgccgagagtgataatgtcgttcacccgcgactcatataccatctcctcatccagttcacccacccgccgcgaaccggcctgttcttcaccttcgggtaataacacgctatacatgccacgatccggaatggtgccaccgctggtaaccgccaacaattgagcgccaggtcgggcggtcaatatcccggtctcccggttccagaccagtttggggcgaaaagcagaaaaatcgccagagggatagcgcccggaaagcatatccagcgtagcgtcaaaaacacgtcttggcagatctttccacggtgcggcacggcgtacgcgggagtaccattcgtctacctgtaatgcatccatcgccgcggcggcaacggtttgctgcgcaaggacgtcgagtggattatgcggcggtgtcaggttttccagcctgcctgcgaacatacactctacaatgactgcggaatcgactaagtcacgccgggtacgagggaaaaacagccctttagatacaccgccaacctgatgtccggcgcgaccaatgcgttgtaacccactggcaacagaaagcggcgttgccacctgaatcatcagatccactgcgcccatatcaatccccagttcgagactggaggttgcgaccacgcagcgtaactcacccgatttcagcgcctgctcggtgattgctcgttgttctttagagacggagccgtggtgtgagcgggcaataaaaacgtcgctactttgtacacggttagaggttgcgccggaggtcgactcgaaatgggccgcatcaacggcgatagacggggaacgctgtaagcgtgcggcgtaaagctcatttaatcgtgccgtcagtttttccgccagcccacgtgaattagtaaagacaatggtcgagcgatggcgcaacacttcatcaaggatacccgtttcaatatatggccagatggagccttcccggccggcatggctgtcttcgccggtgctgctggcgaccgatgagacatcatccatattggcgaccggtacgacaattcgtatctgcggatggcgcattgcgggcgggttgactaccgtaaccgggcgattgccaccaagaaatgctgccacatcgctggctgagcgcacagtggcagaaaggccaattcgctgtgctgaggtgtggagcagcgcatcgagccgctccagacttaacgccagatgcgcaccacgtttactgcccgctaccgcgtggacttcatcaataattaccgtttcgacgccgcgtagcgtttcgcgcgcgcgggaggtcagcatcagatagagtgattcgggtgtggtgatcagaatatccggcggattacgggtgagtttgctgcgttcctgtgcaggcgtatcgccagtacggatccctacgcgaagattgacttccgtttcgccgcgccgccgccgttcatcggcaatacccttcaacgggatctgcaagttgcgctgaacgtcggtgcccagggcttttatcggtgaaatatagaggatgcgtgaggttttacgcttatgcgcctcgcgggtatcttcgccgccttcgcggaagagccgatcgagggcgtagagaaatgctgccagcgttttcccggagccagtcggtgcaatcaccagcgcatgttcgcctcgcgccgccacatgccaggtttgcgactggacagcggtcggctgtttaaaggcgcgaagaaaccagtcgcgggtcgccagtgaaaacacgtccggcaggagcgatgaagggtctggattatctgccattaacgctattccccgtgaatatcatgcttgatgcgtggaatagcctcactatagatgcctgaatcattgcatgtcatcaggcatcgactcgattacacctcttcggcggcaggtagcggccagcctcccagacgtttccagcggttgacgatttcacaaaacagcacagcagtgcgttcggtgtcgtacagcgcggagtgcgcctgggtgctgtcgaagtccatgccagcggtctggcaagcctttgacaatacggtttgtccgagtgccagcccggccagtgcagcagtgtcaaaagtggcgaaagggtggaacgggttacgtttcagtgaggcgcgttctgcggcggccatcataaagctgtgatcaaaattggcattgtgcgccaccataatggcgcggttacagccgctcgctttaatacctttacgtacaactttaaaaatttcgtgcagcgcctcgtattcgctgaccgcgccgcgatcgggatcgttcgggtcaatgccgttgaaggcgagggcctctggctgcaaatttgcgccgacaaatggttcgacgtggaaatgtaatgtggtgtccggcatcagccagccttgttcatccattttcagggtgatggcggcaatctcaagcagcgcatcggttttggcgttaaatccggctgtttcaacatcgatcacaacaggataaaaaccacgaaaacggtcgcacagaccggtaagttgagcgttatcggacatctgattctcttaatacggataaattgcagcgcgcattatgacaaatattacttgtcgatgcagtaaagatgcgggcgcgatgagttcacgcccggcaggagattagttgcccagaccgcgaccggcgtctttctcttcgattaactcaattttgtaaccgtccggatcttccacaaacgcgataaccgtagtaccgccttttaccggacccgcttcacgggtcacgttacccccgttttgacggattttttcgcacgcttcagcggcgttatctacgctaagcgcgatgtgaccataagcagtgccgagttcgtatttatccacgccccagttgtaggtcagttcaatcaccgcttcttcggtttccgggccgtagccaacaaacgccagtgagtatttgtattccgggttttcgctggtacgcagcagtttcatgcccagcactttggtataaaaatcgatggagcgttgcagatcgccaacgcgcagcatggtatgaagaagacgcatctttttatcctaaaaatggctaacagattcaaaatgttgttttagtatagcggcggctttacgccgctcgcaatgttggattacaacgtcgggtaatcggtatagccttccgcgccgccaccgtagaaactttcggcacgctgtgggttaagctcagctctgcgctgcaagcgggcgaccagatccgggttcgcaatccagtcacgaccaaatgccaccgcatcaattaaccctttgccaatcagcgtttcggctttttctaccgtgtatgcacctgcgccgataatcggaccgtggaaacgggcgcgtactttttcgcggaacgcatcagtatacggttcacctcccgcccaatctggttctgacatatgcagataagcaatgccgcgtttacccagttgttcaatcagatacagtgcatcggcttcttcattcgggccgttatccgtgttctggaaagtaccgattggcgaaacgcgaatgccaatgcgatcggcaccccattcttcaatcccggcatcgaccacttccagtaccaaacgtgcgcgattttccacgctgccgccgtactgatcggtacgatggtttgaagaaggggaaaggaactgatgcagcaaataaccgtgagcagagtggagctctaccagatcaaaaccggcttcacgcgcgttagcaatggcctgacggaaatcattgacgatacctggaatctcttccagttcaagcgcacgcggcatggatgtttcaacacggatcgcctgaccattttcatcgcgcagagaagtacgtgttcccgcgctaagtgctgaaggcgctaccggtgcctgaccgccaggttgcaggctggcgtgagaaatgcgtccagtgtgccacagctgtacggccatatgaccattttcagcatgaacgccagcggtaatttttttccatgcggcaatttgttccggactatggatgccaggtgcaccagcatacccttttgcctgggcagaaatttgcgtggcttcgctaataatcaaaccggcactggcacgttggcgatagtattcctccatcaacggggtagggatgtcacccggttcaatactgcgcagacgcgtcagcggtgccataaaaatacggtttgccgcagttattgcgcccactttcagtggggaatacagtttttcagatgacataaaggctcccggtcgtctggtgataaaaaatgcctgctaaacggcaggcgtcgcaataatggtttttacatgtgccagcgcgttttccagtggctcggaattgcgcgaaattttggcctgcagattcgcacccagccatagtgcgtaaagcacttgtgcctgttgcagcggttcgccacaaaaggttaaacagtggttctcatggccattttccagcgcctgagagagcagggcaatcacgccgcgagcgcctttatccatcgcgctacgcatatcttctgacagatcgcacacttcggcagagagttttactgtcaggcaaccactgatggttccatgttggcaaaactggttcagtgtttgctggtaataagccagtatgcggtcgcggtagttaccttcgccggattgcagcaactcagtcagtcgctggtgatatgtggcgtaatggcgctcaagcatagcaacgccaaacgcttctttagagcgaaagtagtgatagaaggaccctttcggcacttcagcgatttttagtaattcgcttagccccatcccggtgaacccacgttgcaggcaaagttgctcgcccgtcgccaggagatgttcgcgagtatcatgttcggtgtgtttgttcatgcgttggagtgtagtagaccagtcggtctagtgcaagcaaagttgctactttggacattaacagcttcaataatggtaataatcttatttgaggagggcgaagtggcggagcaattagagttctttcccgtccagagcccgtgccggggaatttgccagtctgacgaacgcgggttttgtcgcggctgttttcgtagtcgggatgagcgttttaactggaataaaatgagcgatggcgaaaaacaagaggtgctgcgcctttgtcggcagcgattaatgcgcaaattacgcgcaaataagccagcgtcatcagacgaaccggagcaaccatcactcttttgaacctaatcttgcgtatactcctctcatatctgataagaggaagcgattatggttcagcgtattactattgcgccgcaaggcccggagttttcccgttttgtgatgggctactggcgattgatggactggaatatgtccgcccgccagctggtcagttttattgaagagcatctggatctcggcgtgaccaccgtggaccatgctgatatttatggtggctatcagtgcgaagcggcgtttggcgaggcactgaaactggcacctcacctgcgtgaacggatggaaatcgtcagtaaatgcggtatcgcgacgaccgcgcgtgaagaaaacgtcattggtcattacatcactgaccgcgatcacatcattaagagcgccgaacagtcgctaattaatctcgcgaccgatcatctggatctgctgttaatccaccgaccagacccgttaatggatgccgatgaagtggcggacgcgttcaaacatctgcatcagagcggcaaagtgcgtcattttggcgtatcgaactttacgcctgcgcaatttgccctgttgaaatcacgtctgccgtttacccttgccactaatcaggtggaaatatccccggtgcatcagccgttactgctggatggcacgctcgaccaactacaacaactgcgtgttcgtccgatggcgtggtcctgccttggtggtggtcgtctgtttaatgatgattatttccagccgctgcgtgatgaactggctgtggtggcggaggagttaaacgcgggctcgattgaacaggtggtttacgcctgggtattacgtttaccgtcgcagccgctgccaattatcggctcaggtaaaattgagcgcgtacgggcagctgtcgaagcagaaacactgaaaatgacccgtcaacaatggtttcgtatccgtaaagcggcactggggtacgacgtaccgtaagcacttttaggaatagccgccgttcaaaaatgtgtcactggtttacacttattcaggaatgcacaatgaacggaggtcctatgaaacgttttagtctggccattctggcgctggttgttgcgaccggcgcacaagctgccagtgaaaaagtcgagatgaacctcgtcacgtcgcaaggggttgggcagtcaattggtagcgtcaccattactgaaaccgataaaggtctggagttttcacccgatctgaaagcattaccccccggtgaacatggcttccatattcatgccaaaggaagctgccagccagccaccaaagatggcaaagccagcgccgcggaatccgcaggcgggcatcttgatccacaaaataccggtaaacatgaagggccagaaggtaccgggcatttaggcgatctgcctgcactggtcgtcaataatgacggcaaagctaccgatgccgtcatcgcgcctcgtctgaaatcactggatgaaatcaaagacaaggcgctgatggtccacgttggcggcgataatatgtccgatcaacctaaaccgctgggcggtggcggtgaacgctatgcctgtggtgtaattaagtaattacgaggccagcgtaccttgcggtggtgcttgctcaagttgcgaaagcgagcagtacagccgccagacaattgccgccagctcacgggcggcaggttgatgatgacgggcaaggctgtcgcaaatccgctgtaattcttcaagtgtggccgccagtgatttttgctgaacgccacgctcactcatcactccccgcaacagtgaaatacagttatcccgtactcgcgataacggatcggaacgcgattcccagtcgcgcaattgccagacaacatgagaacagttcagcagcactacaccccagcgtaataaccaacggcgagccagcgcatcctggctgttactcaactgactgacgtgatgataagtgagcgattcaaattcgcttccactcagtgttggatggcggcttagctgatcgacaaaatcccggcgcagcgcgcgaatatggcggcggcttttacgagcatccgatcctggacgcagaatggcgaacgctagccaagccagcgcaacgccaacgatttttgccagattctcgttaagaaaatcagcaaaatcatacaccgggggattagtgacagcgataaacgaacccataaaaacaatcagttgcccccacagtgcggcaaatttgggcatctgcaatttaagaagctgcattgtcgccagcagtggaaagagaaacagtaaaaattgccacagatcgctaatctggaccatcaggccaaatttgaccacaaagctgaatagcgaaagtaacaccagcgtgcgcatcagcagtgacaacgacttaaacggtgctgcgacggcggagtagagtacgcagctaattgctgccagcgttaatgcattggcaccggcatcccattgcgatgcaatactccatgcgccaatcatcatcaacgtacaaaatgtacgcagcccgctccacatagcttcggcgttgtcggtatgacgagccagagcggatgtccgtgcgagtctggcatgatcatctacaccgctttgcagacgatgtaattcctgactactttgcagataaaggcggcaaaaataacgtagtcgctgccagaaggcgacgtgccggtagtcggcgacgttggtcgggcgtagcggggcgataatacgtgcgacggtgtaagcatctgtttgcgaactggcgagcgcagtcagcaattgttcgagaatttctcgcgtggcacctggcggtgagggccagttgagcaacatacgtcgcaggctggagatgacactggtcatacgtaattgctggtggagtagcgcattaaggcgcgcgttttgctggcgaaaacgatagtggctccagaaagcctggatacgcagcaaattcatggtcagtatctgcccaatcaccccctcatgtgctgcacgaatggcatcgtttgtttcaggctgccagagtaaactggcatgttccagtaatcgggcgtgcatgtttttcaatgcagttaaaagggcagtagcatcggaactgctaggcaggatcatcatcatcatgccgccgcacaaaataccgactatcacctcgcaaacgcgcgcctgagcgatatcccacagctggctggcctcagtaatattaaccatcggaaaggcgatgatggcagccgtgtagcccgccagttgaaatgcatacgcgacgttattcgtgaagtgcgcacaggcccaggtacaaaagccaagccacgccgacatgctcaatagaaaaaaccacggctcattgagcgtatgtccggcaagaagcagtgccgcaatggctcccagtaaactgccagcgatgcgtccgaggcttttgctgatgacaccgccaacggtgggaaagctaaccactgcagccgaggtcatcgcccaatagggttcatccagattcaaataataggcaaccgtcagcgccagacacatggcaatggtattgcgtaacgcataacgccattgcgccagcgtggccctgaaccagggcaaattgcgcaaggaccattacgatgcgttcattattgacctacggcaatgctacaggtggtgcccgacaccagcgtgacatcgcctggaactttatccagcgcaaagcggacgggaacgcgttgggcgagacgaacccaggggacgttaggtttcacatccggaataaggcttgagtcactttcaacgctctgatcataaatcgcccgaccgatactggaaacgtgaccctgtaacgttttgttatcactatagagggtaatttgtgctggtgcaccttcgcggatatggcgcaacttggtttcttcaaaataaccaatgacgtaaaacgagtggctgtcgacaagggcaaaaagcggtttcccggtgtcagcgtaatcgccgatgcgggtagtgaggttagtcacccgtccactcaccggggcgcgaatttccgtttgcgccagttgccattgtgtctgtttcagcgtggcctgtgcggcattaacactggcctgcatcgctttaacattgaggttagcggtatcgagttcttcggcagaaataaaattttgtgagagatgacgacgacgattcgcttcgttattggcttttgcgaggtcagattgcgctttcgccagctgagcctgtgcgttcagctcggcgatctgaaagggcgttttatcgatcgtgagcagaagatcccctgcgttaaccagctggttgtcttttatattcagctcaacaatacgtcccgacacctgtggggtgatagaaacctgttctgcgcgtattttcccgtcgcgtgtccacggagattgcatgtaataattccacagccaccatccggcaagaaccgcaactaccgctacaatgattgttgagaaatacttaattgttttaattgacatagttaccacgcaatcagtattgccagagcaaggcaaacgcaaatcgcaaacagcgataaatccattaacaagggatgccagatgtcaccggcgtagatccagccacgaagcaggcggtgtacgacaagccagatgacgaatccaaacgcgaatgctttgaaaaacggaggaaaatagacggacgcaccgaacaccagatcttgtaagggcaatcctgttgcattgagcataaacttcacaaagtagattcctttacgaccgaatatattgcgttagattaataaatattctttaagtgcgaaaaatttacgcgcaatttctgaaaaatatgtctgacggtaaccaaatgcagcaatacatttgttttagcaatacaattgctgcacactattctaaaagccgcataatatcttagcaagctaattataaggagatgaaattggaatcgccactaggttctgatctggcacggttggtgcgcatatggcgtgctctgatagaccatcgcctgaaaccgctggagttaacacaaacccattgggttacgttacacaatatccatcagttacctccagaccagtcgcaaattcaactggcaaaagcgattggcatcgagcagccatcactggtccgtactctggaccaactggaagaaaaagggttaatttcgcgtcaaacttgtgccagcgatcgtcgggctaaacgtattaaactgacggaaaaggcagagccactgatcagcgaaatggaagctgttattaacaaaacccgcgcggaaatattacatggcatctccgcagaggaactggagcaactgattacgctcatcgcaaaacttgagcataatatcattgagttacaggccaaagggtgaaatgaagggggcgtgtggtcagtaacctgaccacacgcaaacttatttagcgcggagaaacggtcacctgactgccattgctggccagtacgacacgttggcccggagagaaacgagtgttgccttgtttctgtaccaccatgatggtattaccatcgtctttacgaatttccagctcgacaccctgcgttttgttcattgcactctgtacgccctgaccagctacgccacctgcaacagcgcctgctgcagtagccagagaacgcccggttccgccaccaacagtattccccaggaaaccaccaagaacagcaccgccaattgcaccgataacgttggaatcatcaccgccctgaatctgtaccggacgtacgttaacgatggtgccatagctgacattctgtacttgtttcgcttcagaagcggtataaacatcccctgacagggtgtcgttattaacacaaccgacaagagacagacctaccattgaaacaaccaatacgcgtttaatcattgaaaaatctcctgttcaccatgaaacgccacgcaagcatccctcatggtcaaagtatatggcatatgtgaatccatggttacatgttctaccaaatatgagcaaatcataatgaaagtaggatcaaccaattataaacaaaacattcatgatgattattgatttgaagataatgttttactaccaacggtaaaaatcggtcattccgcatggtatccacgaaaagtttatgtttgagtggtgcgcaaacgtcagattgaaaaaggatgaactatgaaatcgggccgctttattggcgttatgtcaggcaccagccttgatggtgttgatgttgtgttggcgacaatagatgaacaccgggtcgcacagctggcaagcttgagctggccgatcccggtgtctctgaaacaggctgtactggatatttgccagggccagcagcttacactttcgcagtttggacagcttgatactcaactcgggcgactttttgctgatgcggtcaatgccttgcttaaggaacaaaacctgcaggcgagagatatagttgcgatcggctgtcacggtcaaaccgtctggcatgaaccgacgggcgtggcaccacacactttacagattggcgataacaatcaaattgtggcacgcaccggaattacggttgtcggtgattttcgccgtcgcgatattgccttgggaggacaaggcgcaccgctggtacctgcgttccatcatgccttgctggctcacccaaccgagcgacgaatggtgctcaatattggcggcatcgccaatctgtcactgctcattcctgggcagccggttggcggctacgataccggtcctggtaacatgctgatggatgcctggatctggcgtcaggccggtaaaccttacgataaagatgccgagtgggcacgggcgggtaaagttattctcccactgctgcaaaatatgctcagcgacccatatttctcgcaacctgcaccgaaaagcaccggacgcgaatactttaactacggctggctggagcgccatttacgccattttccgggtgttgatccccgtgatgttcaggccacactggcagaactcaccgccgtgaccatttctgaacaagttttgttgagcggtggctgcgaacgattgatggtatgtggtggaggtagtcgtaacccgctactcatggcgcgtctggcggcattactgccaggcacagaagtcaccaccaccgatgccgttggcattagtggcgatgacatggaagcattggcattcgcctggcttgcctggcggacgctggcgggattaccaggaaatctgccttccgtcactggcgcaagccaggagacggtactgggggctattttccctgctaacccgtgatatcagagttaactgaatttttcttaccgcgtctgccgttacacttgaaacgttagggagggcgtattgccctccagaccaggaaagtcttcgggaaatgtctatgaaaaaactgttactgatctgtttgccggtgcttctcaccggctgtagcgcgttcaatcaactggttgagcacatgcaaaccgctacgctggaataccagtgtgatgaaaaaccgttgacggtcaaactgaataatccgcgccaggaagtcagttttgtttacgataatcaactactgcatctcaaacagggcatttcagcgtctggtgcacgttacactgacggaatctatgttttctggtcgaaaggcgatgaagcgactgtctataaacgcgaccgcatcgtattgaataactgtcagttacaaaatccacagcgttgagatttttccaggggcggcgcacaatagcgtcacccactgacaatccgtaaagaaaaccatgtctgataacgacgaattgcagcaaatcgcgcatctgcgccgtgaatacaccaaaggcgggttacgccgtcgcgatcttcccgccgatccattaaccctttttgaacgttggctctctcaggcgtgtgaagccaaactggcagaccctaccgcgatggtggtcgctaccgtggatgaacatgctcagccttatcaacgcatcgttttactcaaacattacgacgaaaaaggcatggtgttttacaccaacctcggcagccgtaaagcacatcaaattgaaaataatccgcgcgttagcctgctgttcccgtggcatacccttgagcgccaggtgatggtgatcggtaaagcggaacgactttcgactctcgaagtgatgaaatattttcatagccgcccgcgtgatagccagattggtgcatgggtttcgaagcagtccagtcgcatttctgcccgcggtatccttgaaagtaaattcctggagctgaagcagaagtttcaacagggcgaagtgccattgccgagcttttggggcggttttcgcgtcagccttgaacagattgagttctggcagggcggtgagcatcgcctgcatgaccgctttttgtaccagcgtgaaaatgatgcgtggaagattgatcgtcttgcaccctgaaaagatgcaaaaatcttgctttaatcgctggtactcctgattctggcactttattctatgtctctttcgcatctggcgaaaagtcgtgtaccggcaaaggtgcagtcgttatatacatggagattttgatggcaagcagtaacttgattaaacaattgcaagagcgggggctggtagcccaggtgacggacgaggaagcgttagcagagcgactggcgcaaggcccgatcgcgctctattgcggcttcgatcctaccgctgacagcttgcatttggggcatcttgttccattgttatgcctgaaacgcttccagcaggcgggccacaagccggttgcgctggtaggcggcgcgacgggtctgattggcgacccgagcttcaaagctgccgagcgtaagctgaacaccgaagaaactgttcaggagtgggtggacaaaatccgcaagcaggttgccccgttcctcgatttcgactgtggagaaaactctgctatcgcggcgaacaactatgactggttcggcaatatgaatgtgctgaccttcctgcgcgatattggcaaacacttctccgttaaccagatgatcaacaaagaagcggttaagcagcgtctcaaccgtgaagatcaggggatttcgttcactgagttttcctacaacctgttgcagggttatgacttcgcctgtctgaacaaacagt

(The sequence listing continues in the following parts.)

1. A diagnostic method of determining an infection of a patient with Shigella species potentially resistant to antimicrobial drug, e.g. antibiotic, treatment, comprising the steps of:
a) obtaining or providing a sample containing or suspected of containing at least one Shigella species from the patient;
b) determining the presence of at least one mutation in at least two genes from the group of genes consisting of SSON53_12105, SSON53_12455, SSON53_12070, SSON53_12475, metH, SSON53_00425, SSON53_23830, SSON53_13575, flgE, SSON53_12500, SSON53_06660, SSON53_24790, SSON53_16770, SSON53_24480, SSON53_08770, SSON53_04795, SSON53_07430, SSON53_14085, SSON53_07440, SSON53_08950, SSON53_25555, SSON53_09145, SSON53_25565, SSON53_24780, SSON53_04400, SSON53_15280, rimO, SSON53_04930, SSON53_23390, rhaB, SSON53_17960, thiH, SSON53_03725, SSON53_09500, SSON53_25405, SSON53_13530, astD, SSON53_07945, SSON53_10080, SSON53_10655, SSON53_13400, SSON53_13555, SSON53_14945, SSON53_15285, fucI, SSON53_02755, SSON53_06415, SSON53_04615, SSON53_17330, and pdxA, or from the group of genes consisting of SSON53_12105, SSON53_12455, SSON53_12475, metH, SSON53_00425, SSON53_23830, SSON53_13575, flgE, SSON53_12500, SSON53_24790, SSON53_16770, SSON53_08770, SSON53_04795, SSON53_07430, SSON53_14085, SSON53_07440, SSON53_08950, SSON53_25555, SSON53_09145, SSON53_25565, SSON53_24780, SSON53_04400, SSON53_15280, SSON53_04930, SSON53_23390, rhaB, SSON53_17960, thiH, SSON53_03725, SSON53_09500, SSON53_25405, SSON53_13530, astD, SSON53_07945, SSON53_10080, SSON53_10655, SSON53_13400, SSON53_13555, SSON53_14945, SSON53_15285, fucI, SSON53_02755, SSON53_06415, SSON53_04615, SSON53_17330, pdxA, SSON53_04690, SSON53_04945, SSON53_06005, and SSON53_06085, wherein the presence of said at least two mutations is indicative of an infection with an antimicrobial drug, e.g. antibiotic, resistant Shigella strain in said patient.

2. A method of selecting a treatment of a patient suffering from an infection with a potentially resistant Shigella strain, comprising the steps of:
a) obtaining or providing a sample containing or suspected of containing at least one Shigella species from the patient;
b) determining the presence of at least one mutation in at least two genes from the group of genes consisting of SSON53_12105, SSON53_12455, SSON53_12070, SSON53_12475, metH, SSON53_00425, SSON53_23830, SSON53_13575, flgE, SSON53_12500, SSON53_06660, SSON53_24790, SSON53_16770, SSON53_24480, SSON53_08770, SSON53_04795, SSON53_07430, SSON53_14085, SSON53_07440, SSON53_08950, SSON53_25555, SSON53_09145, SSON53_25565, SSON53_24780, SSON53_04400, SSON53_15280, rimO, SSON53_04930, SSON53_23390, rhaB, SSON53_17960, thiH, SSON53_03725, SSON53_09500, SSON53_25405, SSON53_13530, astD, SSON53_07945, SSON53_10080, SSON53_10655, SSON53_13400, SSON53_13555, SSON53_14945, SSON53_15285, fucI, SSON53_02755, SSON53_06415, SSON53_04615, SSON53_17330, and pdxA, or from the group of genes consisting of SSON53_12105, SSON53_12455, SSON53_12475, metH, SSON53_00425, SSON53_23830, SSON53_13575, flgE, SSON53_12500, SSON53_24790, SSON53_16770, SSON53_08770, SSON53_04795, SSON53_07430, SSON53_14085, SSON53_07440, SSON53_08950, SSON53_25555, SSON53_09145, SSON53_25565, SSON53_24780, SSON53_04400, SSON53_15280, SSON53_04930, SSON53_23390, rhaB, SSON53_17960, thiH, SSON53_03725, SSON53_09500, SSON53_25405, SSON53_13530, astD, SSON53_07945, SSON53_10080, SSON53_10655, SSON53_13400, SSON53_13555, SSON53_14945, SSON53_15285, fucI, SSON53_02755, SSON53_06415, SSON53_04615, SSON53_17330, pdxA, SSON53_04690, SSON53_04945, SSON53_06005, and SSON53_06085, wherein the presence of said at least two mutations is indicative of a resistance to one or more antimicrobial, e.g. antibiotic, drugs;
c) identifying said at least one or more antimicrobial, e.g. antibiotic, drugs; and
d) selecting one or more antimicrobial, e.g. antibiotic, drugs different from the ones identified in step c) and being suitable for the treatment of a Shigella infection.

3. The method of one or more of the preceding claims, wherein the method involves determining the resistance of Shigella to one or more antimicrobial, e.g. antibiotic, drugs.

4. The method of any one of claims 1 to 3, wherein the antimicrobial, e.g. antibiotic, drug is selected from lactam antibiotics and the presence of a mutation in the following genes is determined: SSON53_12105, SSON53_12455, SSON53_12070, SSON53_12475, metH, SSON53_00425, SSON53_23830, SSON53_13575, flgE, SSON53_12500, SSON53_06660, SSON53_24790, SSON53_16770, SSON53_24480, SSON53_08770, SSON53_04795, SSON53_07430, SSON53_14085, SSON53_07440, SSON53_08950, SSON53_25555, SSON53_09145, SSON53_25565, SSON53_24780, SSON53_04400, SSON53_15280, rimO, SSON53_04930, SSON53_23390, rhaB, SSON53_17960, thiH, SSON53_03725, SSON53_09500, SSON53_25405, SSON53_13530, astD, SSON53_07945, SSON53_10080, SSON53_10655, SSON53_13400, SSON53_13555, SSON53_14945, SSON53_15285, fucI, SSON53_02755, SSON53_06415, SSON53_04615, SSON53_17330, and/or pdxA, or SSON53_12105, SSON53_12455, SSON53_12475, metH, SSON53_00425, SSON53_23830, SSON53_13575, flgE, SSON53_12500, SSON53_24790, SSON53_16770, SSON53_08770, SSON53_04795, SSON53_07430, SSON53_14085, SSON53_07440, SSON53_08950, SSON53_25555, SSON53_09145, SSON53_25565, SSON53_24780, SSON53_04400, SSON53_15280, SSON53_04930, SSON53_23390, rhaB, SSON53_17960, thiH, SSON53_03725, SSON53_09500, SSON53_25405, SSON53_13530, astD, SSON53_07945, SSON53_10080, SSON53_10655, SSON53_13400, SSON53_13555, SSON53_14945, SSON53_15285, fucI, SSON53_02755, SSON53_06415, SSON53_04615, SSON53_17330, pdxA, SSON53_04690, SSON53_04945, SSON53_06005, and/or SSON53_06085.

5. The method of any one of claims 1 to 3, wherein the antimicrobial, e.g. antibiotic, drug is selected from polyketide antibiotics, preferably tetracycline antibiotics, and the presence of a mutation in the following genes is determined: metH, SSON53_24790, SSON53_08770, SSON53_24780, SSON53_15280, SSON53_10655, SSON53_13555, and/or SSON53_06415, or metH, SSON53_24790, SSON53_08770, SSON53_24780, SSON53_15280, SSON53_10655, SSON53_13555, and/or SSON53_06415.

6. The method of one or more of the preceding claims, wherein the antimicrobial drug, e.g. antibiotic drug, is selected from the group consisting of Amoxicillin/K Clavulanate (AUG), Ampicillin (AM), Aztreonam (AZT), Cefazolin (CFZ), Cefepime (CPE), Cefotaxime (CFT), Ceftazidime (CAZ), Ceftriaxone (CAX), Cefuroxime (CRM), Cephalotin (CF), Ciprofloxacin (CP), Ertapenem (ETP), Gentamicin (GM), Imipenem (IMP), Levofloxacin (LVX), Meropenem (MER), Piperacillin/Tazobactam (P/T), Ampicillin/Sulbactam (A/S), Tetracycline (TE), Tobramycin (TO), and Trimethoprim/Sulfamethoxazole (T/S).

7. The method of any one of claims 1 to 6, wherein the antibiotic drug is CF and a mutation in at least one of the following nucleotide positions is detected with regard to reference genome NC_016822 as annotated at the NCBI: 2241215, 2309519, 2314492, 4595667, 87512, 4502174, 2543074, 1159191, 2325584, 4707429, 3134050, 1655745, 949314, 1427818, 2636621, 1429397, 1690889, 4856482, 1723070, 4857482, 4705326, 862961, 2876708, 980321, 4429947, 4431976, 3376607, 4565385, 750613, 1781189, 4821412, 2533864, 1511130, 1513422, 1901825, 1990704, 2506615, 2539010, 2803779, 2877526, 3239464, 545532, 1257335, 906989, 3237959, 60014, 921872, 983367, 1182426, 1200860; and/or
wherein the antibiotic drug is CFZ and a mutation in at least one of the following nucleotide positions is detected with regard to reference genome NC_016822 as annotated at the NCBI: 3134050; and/or
wherein the antibiotic drug is A/S and a mutation in at least one of the following nucleotide positions is detected with regard to reference genome NC_016822 as annotated at the NCBI: 2241215, 2309519, 2314492, 4595667, 87512, 4502174, 2543074, 1159191, 2325584, 4707429, 3134050, 1655745, 949314, 1427818, 2636621, 1429397, 1690889, 4856482, 1723070, 4857482, 4705326, 862961, 2876708, 980321, 4429947, 4431976, 3376607, 4565385, 750613, 1781189, 4821412, 2533864, 1511130, 1513422, 1901825, 1990704, 2506615, 2539010, 2803779, 2877526, 3239464, 545532, 1257335, 906989, 3237959, 60014, 921872, 983367, 1182426, 1200860; and/or
wherein the antibiotic drug is CRM and a mutation in at least one of the following nucleotide positions is detected with regard to reference genome NC_016822 as annotated at the NCBI: 2241215, 2309519, 2314492, 4595667, 87512, 4502174, 2543074, 1159191, 2325584, 4707429, 3134050, 1655745, 949314, 1427818, 2636621, 1429397, 1690889, 4856482, 1723070, 4857482, 4705326, 862961, 2876708, 980321, 4429947, 4431976, 3376607, 4565385, 750613, 1781189, 4821412, 2533864, 1511130, 1513422, 1901825, 1990704, 2506615, 2539010, 2803779, 2877526, 3239464, 545532, 1257335, 906989, 3237959, 60014, 921872, 983367, 1182426, 1200860; and/or
wherein the antibiotic drug is P/T and a mutation in at least one of the following nucleotide positions is detected with regard to reference genome NC_016822 as annotated at the NCBI: 2241215, 4595667, 4502174, 2543074, 1159191, 2325584, 4707429, 3134050, 1655745, 949314, 1427818, 1429397, 1690889, 4856482, 1723070, 4857482, 4705326, 862961, 2876708, 980321, 4429947, 4431976, 3376607, 4565385, 750613, 1781189, 4821412, 2533864, 1511130, 1513422, 1901825, 1990704, 2506615, 2539010, 2803779, 2877526, 3239464, 545532, 1257335, 906989, 3237959, 60014, 921872, 983367, 1182426, 1200860; and/or
wherein the antibiotic drug is AM and a mutation in at least one of the following nucleotide positions is detected with regard to reference genome NC_016822 as annotated at the NCBI: 2241215, 2309519, 2314492, 4595667, 87512, 4502174, 2543074, 1159191, 2325584, 4707429, 3134050, 1655745, 949314, 1427818, 2636621, 1429397, 1690889, 4856482, 1723070, 4857482, 4705326, 862961, 2876708, 980321, 4429947, 4431976, 3376607, 4565385, 750613, 1781189, 4821412, 2533864, 1511130, 1513422, 1901825, 1990704, 2506615, 2539010, 2803779, 2877526, 3239464, 545532, 1257335, 906989, 3237959, 60014, 921872, 983367, 1182426, 1200860; and/or
wherein the antibiotic drug is AUG and a mutation in at least one of the following nucleotide positions is detected with regard to reference genome NC_016822 as annotated at the NCBI: 2309519, 2314492, 4595667, 87512, 1159191, 2325584, 4707429, 3134050, 1427818, 2636621, 1429397, 2877526, 1200860; and/or
wherein the antibiotic drug is TE and a mutation in at least one of the following nucleotide positions is detected with regard to reference genome NC_016822 as annotated at the NCBI: 4595667, 4707429, 1655745, 4705326, 2876708, 1990704, 2539010, 1257335.

8. The method of any one of claims 1 to 7, wherein the resistance of a bacterial microorganism belonging to the species Shigella against 1, 2, 3, 4, 5, 6, 7, 8, 9, 10, 11, 12, 13, 14, 15 or 16, 17, 18, 19, 20 or 21 antibiotic drugs is determined.

9. The method of one or more of the preceding claims, wherein determining the nucleic acid sequence information or the presence of a mutation comprises determining a partial sequence or an entire sequence of the at least two genes.

10. The method of one or more of the preceding claims, wherein determining the nucleic acid sequence information or the presence of a mutation comprises determining a partial or entire sequence of the genome of the Shigella species, wherein said partial or entire sequence of the genome comprises at least a partial sequence of said at least two genes.

11. The method of one or more of the preceding claims, wherein determining the nucleic acid sequence information or the presence of a mutation comprises using a next generation sequencing or high throughput sequencing method, preferably wherein a partial or entire genome sequence of the bacterial organism of Shigella species is determined by using a next generation sequencing or high throughput sequencing method.

12. A method of determining an antimicrobial drug, e.g. antibiotic, resistance profile for bacterial microorganisms of Shigella species, comprising:
obtaining or providing a first data set of gene sequences of a plurality of clinical isolates of Shigella species;
providing a second data set of antimicrobial drug, e.g. antibiotic, resistance of the plurality of clinical isolates of Shigella species;
aligning the gene sequences of the first data set to at least one, preferably one, reference genome of Shigella, and/or assembling the gene sequence of the first data set, at least in part;
analyzing the gene sequences of the first data set for genetic variants to obtain a third data set of genetic variants;
correlating the third data set with the second data set and statistically analyzing the correlation; and
determining the genetic sites in the genome of Shigella associated with antimicrobial drug, e.g. antibiotic, resistance.

13. A diagnostic method of determining an infection of a patient with Shigella species potentially resistant to antimicrobial drug treatment, comprising the steps of:
a) obtaining or providing a sample containing or suspected of containing a bacterial microorganism belonging to the species Shigella from the patient;
b) determining the presence of at least one mutation in at least one gene of the bacterial microorganism belonging to the species Shigella as determined by the method of claim 12, wherein the presence of said at least one mutation is indicative of an infection with an antimicrobial drug resistant Shigella strain in said patient.

14. A method of selecting a treatment of a patient suffering from an infection with a potentially resistant Shigella strain, comprising the steps of:
a) obtaining or providing a sample containing or suspected of containing a bacterial microorganism belonging to the species Shigella from the patient;
b) determining the presence of at least one mutation in at least one gene of the bacterial microorganism belonging to the species Shigella as determined by the method of claim 12, wherein the presence of said at least one mutation is indicative of a resistance to one or more antimicrobial drugs;
c) identifying said at least one or more antimicrobial drugs; and
d) selecting one or more antimicrobial drugs different from the ones identified in step c) and being suitable for the treatment of a Shigella infection.

15. A method of acquiring an antimicrobial drug, e.g. antibiotic, resistance profile for bacterial microorganisms of Shigella species, comprising:
obtaining or providing a first data set of gene sequences of a clinical isolate of Shigella species;
providing a second data set of antimicrobial drug, e.g. antibiotic, resistance of a plurality of clinical isolates of Shigella species;
aligning the gene sequences of the first data set to at least one, preferably one, reference genome of Shigella, and/or assembling the gene sequence of the first data set, at least in part;
analyzing the gene sequences of the first data set for genetic variants to obtain a third data set of genetic variants of the first data set;
correlating the third data set with the second data set and statistically analyzing the correlation; and
determining the genetic sites in the genome of Shigella of the first data set associated with antimicrobial drug, e.g. antibiotic, resistance.

16. Computer program product comprising computer executable instructions which, when executed, perform a method according to any one of claims 13 to 15.
